United States Patent Application Publication US 2024/0301379 A1 - sequence listing, part 13

SEQ ID NO: 23756 - protein, 1460 aa, unidentified
  REGION 1..1460: note = Cas Enzyme sequence
MGFLPEHYSQNIDKYGKFFLDNEVKLSWKKDKMGKNEFIFLDSFNEMLEDFRHSQPQLLLDGRKVPYDWTIYYLRKKALTEKISKEELAWILLNFNQKRGYFQLRGEDEEVQGKKIEFYALKVVRVEDTGEKKGKDTWYNVYLESGLGDTDDYWVYRRASSVPIDEWEGQVKEFIVTTTLDNNGSPQIDKEGKVKRSFSIPKPEDWMLVKKKTEVDIKSSGKTVGTYIYDTLLQKPDQKIKGKLIRTIERENYTNELSLILENQKKFHLELQDRELYHQCIELLYCKNEAHKRVIGSWDFTSLFIKDILFYQRPLKSKKALIDNCPYEESFYIENGEKKSKPRKCIAKSHPLFQEFRIWQFISNLRIYQKVKEVDGKLQFNVDVTSDFLRDESAYVELFKWLNERAEVSQEDLLKHLGLKKTKTEDTVSLYRWNYVEDKKYPGNKTRSSILKKLLNDEKEALSEDIELKIWHLLYSVSAQSEIDKALSSKNVSTKGIYSELSVYFSDETIQKIKNVKLESGYGSYSAKAIGKLLPLMRRGKYWNLESIDNHTKERIEKILNGECDETIRARTREKSISLTDISQFKGLPLWLACYIVYDRHSELKTIKKWNSPEDINKFLKEFKQHSLRNPIVEQVTMETLRVVRDIWRRVGSIDEIHIEMGRDMKQTAQERARCSAIISRNENNNLRIKALLHEFMNPELGIENVRPYSPAQQEILRIYEDGVLSSVSEIEDEIKNILKKFNESEEGKRPTKNEIIRYKCWLEQKYRSPYTGEIIPLGKLFTPAYQIEHIIPQARFFDDSFTNKVICEAEVNAKKGDLLGYEFVKEKGGEIVELSGGRNVRIFSVEEYEAFVKEHYKSNKQKMQRLLAEDIPTEFSHRQLNDSRYISKYIRNLLSNIVREDDEQESVSKNVISCNGAITDRLKKDWGVNDVWNHIILPRFVRLEEIRADNGEKFTTFNQEGHRIPSMPLMYQKGFNKKRIDHRHHVMDAIVIACTTRDHVNLLNNECSNPQNNANKHQLSRKLRRYENVSYKQDGKLKEREVPKEFLKPWEEFTRDVEFALKNVIVSFRQNLRVLNKTVNYFQHWKDNSSEKEWKEQKSADHWSIRKPLHKETVSGEVFLWRTRFVSLREALTNPKRIVEKDLRSKILELQRKGYDIERIKKYFEDNKDVWQDVNLSKIEVRYYSREIVDPQTELPKNRYFATRFGNDLISLFSGVSNFEKAKKIIESITDTGIQKILFRHLENKGNDPVLAFSPEGIDEMNRTIKTLNNGKDHKPIYKVRIYECSTMKFPLGSVGNKSKKFVEAAKGTNLYFAVYEKEVENDRGECHKERTFKTIPLNDVIRNLKQGLSIAPNDENGNPPAFILSPNDLVYLPTKEESETDSISQPLDRNRIYKMVSCTGYQVFFVPAFIAAPVLQKIELGSNNKSERARTDEMIKESCIPIKVDRLGMLISINGKAV

SEQ ID NO: 23757 - protein, 1232 aa, unidentified
  REGION 1..1232: note = Cas Enzyme sequence
VEYYALKVVAVEDSGDRKGKDIWYNVKLENGWVYRRASSVPLDWVGKIKEFIVTTDLDEKGNPKKDKDGNVKRSFRAPKEDDWGLLKTRTQAQIDESGQTVGTYIYESLLRMPDQKIRGKLVRTIERKYYKDELRKILVKQSEFHAALQDHNLLLACIEELYPNNEAHRRLLSTSDFIYFLVEDILFYQRPLKSQKGLIDDCPYESHVYRDKKNGNLQHVPLKCVSKSHPLFQEFRLWQFLASLRIYQREKQVDGSLKLDVDVTNEFLQSEDDYVKLFDWLNDRKDIDQKTFLAYKPFGLKKNELSQYRWNYVEDKSYPCNETRADMVSRLNKAGVPEEFLTREKEEALWHILYSISDKKELTKALGTFAEKNGLNETFVEIFSKMPPFESDYASYSLKAIRKLLALMRMGKYWDEQAIDEQTRSRIEKMLTGEYDETIRTRVREKAMHLTDISSFRGLPLWLACYVVYDRHSEAKELVKWETPDDIDHFLRKFKQHSLRNPIVEQVIMETLRTVRDIWRQEGRIDEIHVELGREMKNPSKERARITAQVLENENTNLRIKALLTEFMNPEFEIENVRPYSPAQQEILRIYEEGVLSGVAEKDLPDDIASILKKFRENDVKKRPTTSEVLRYKLWLEQRYRSPYTGRIIPLGKLFTPAYEIEHVIPQSRYFDDSFTNKVICESAVNKLKDNCLGYEFIKKHSGEKVDLGNGETATIFSVEEYERFVKDSYLGNSKKMKKLLLEDIPDNFIERQLNDSRYISKVVKSLLSNIVCEEGEQEGMSKNVIVCTGGVTDRLKKDWGVQDVWNRIILPRFLRLNKITDSTDFTSVSTNGHLLPAVPLHLQKGFNKKRIDHRHHAMDAIVIACAGRNIVNYLNNASARKGSEISRYDLQHLLCDKVKTDANGNYKWILRKPWETFTQDVYVALTNIVVSFKQNLRVINRTTNHYQHYNEDGEKKMIPQTKGDRWAICKPMHKDTVYGEVNLRKEKTLPLKDVLNNPSIVVDKSLKNKLYELLKSQYDLKAITKYFETHQDVWADVNLKKIKVYYFTKETNERFFATRKSLDSSFNQKKIEEEVTDTGIQKILLRHLQQNGNNPDIAFSPDGVERMNQNMTILNNGKWHQPIYKVRTYEKADKFAVGESGNKVKKFVEAAKGTNLFFAVYESMQEDEATGKQVRKRTFATIPLNEVIKRKKQGLSVAPEDSKGNLPIFVLSPNDLVYLPTEEECNTGKII

SEQ ID NO: 23758 - protein, 1536 aa, unidentified
  REGION 1..1536: note = Cas Enzyme sequence
LIIYFIFEKIVNTILVMKKIVGLDLGTNSIGWALINAYIDEYNKEHLYGIEACGSRIIPMDAAILGNFDKGNSISQTADRTSYRGIRRLRERHLLRRERLHRILDLLGFLPKHYSDSLNRYGKFLNDIECKLPWVKDETGSYKFIFQESFKEMLADFTEHHPKLIANNKKVPYDWTIYYLRKKALTQKISKEELAWILLNFNQKRGYYQLRGEEEETPNKLVEYYSLKVEKVEDSGERKGKDTWYNVHLENGMIYRRTSNIPLDWEGKTKEFIVTTDLEADGSPKKDKEGNIKRSFRAPKDDDWTLIKKKTEADIDKIKMTVGAYIYDTLLQKPDQKIRGKLVRTIERKYYKNELYQILKTQSEFHEELRDKQLYIACLNELYPNNEPRRNSISTRDFCHLFIEDIIFYQRPLKSKKSLIDNCPYEENRYIDKESGEIKHASIKCIAKSHPLYQEFRLWQFIVNLRIYRKETDVDVTQELLPTEADYVTLFEWLNEKKEIDQKAFFKYPPFGFKKTTSNYRWNYVEDKPYPCNETHAQIITRLGKAHIPKAFLSKEKEETLWHILYSIEDKQEIEKALHSFANKNNLSEEFIEQFKNFPPFKKEYGSYSAKAIKKLLPLMRMGKYWSIENIDNGTRIRINKIIDGEYDENIRERVRQKAINLTDITHFRALPLWLACYLVYDRHSEVKDIVKWKTPKDIDLYLKSFKQHSLRNPIVEQVITETLRTVRDIWQQVGHIDEIHIELGREMKNPADKRARMSQQMIKNENTNLRIKALLTEFLNPEFGIENVRPYSPSQQDLLRIYEEGVLNSILELPEDIGIILGKFNQTDTLKRPTRSEILRYKLWLEQKYRSPYTGEMIPLSKLFTPAYEIEHIIPQSRYFDDSLSNKVICESEINKLKDRSLGYEFIKNHHGEKVELAFDKPVEVLSVEAYEKLVHESYSHNRSKMKKLLMEDIPDQFIERQLNDSRYISKVVKSLLSNIVREENEQEAISKNVIPCTGGITDRLKKDWGINDVWNKIVLPRFIRLNELTESTRFTSINTNNTMIPSMPLELQKGFNKKRIDHRHHAMDAIIIACANRNIVNYLNNVSASKNTKITRRDLQTLLCHKDKTDNNGNYKWVIDKPWETFTQDTLTALQKITVSFKQNLRVINKTTNHYQHYENGKKIVSNQSKGDSWAIRKSMHKETVHGEVNLRMIKTVSLNEALKKPQAIVEMDLKKKILAMLELGYDTKRIKNYFEENKDTWQDINPSKIKVYYFTKETKDRYFAVRKPIDTSFDKKKIKECITDTGIQQIMLRHLETKDNDPTLAFSPDGIDEMNRNILILNKGKKHQPIYKVRVYEKAEKFTVGQKGNKRTKFVEAAKGTNLFFAIYETEEIDKDTKKVIRKRSYSTIPLNVVIERQKQGLSSAPEDENGNLPKYILSPNDLVYVPTQEEINKGEVVMPIDRDRIYKMVDSSGITANFIPASTANLIFALPKATAEIYCNGENCIQNEYGIGSPQSKNQKAITGEMVKEICFPIKVDRLGNIIQVGLCILTN

SEQ ID NO: 23759 - protein, 1499 aa, unidentified
  REGION 1..1499: note = Cas Enzyme sequence
MKHILGLDLGTNSIGWAVINATTNENTQKEQIVGINAAGSRIIPMDAAQLGDFNKGNTISQTANRTQYRSTRRLYERKKLRRERLHRVLQLLGFLPPHYAAQLNRYGKFIANSEPKLAWEKDANNLPHFIFQQSFQEMLKDFSQKNEGTKKIPYDWTLFYLRKKALTQKIEKEELAWILLNFNQKRGYHQLREEETAKPTSKTRQYFDSQTVTDIVDTGETYKGLKIFTLTLANGEKGKWFGKSVPDWKSQKKDIIVTIELDKNGNDKCDENGETIRRFKIPTEQEWEEQWGLVKAKTEKDLNTSGKTVGSYIYDTLLQTPDQKIRGKLIRTIERKYYKDELYQILTTQEKFHPELRDEKLLQACIEELYPNNEAHRNTISRYSMSKLLVEDVIFYQRPLKSKKSLISDCPYEEHTYVDKETGEIHTIPVKCIAKSHPLFQEFRLWQFLSNLRIYQKEGTLNGKFTTDIDVTNEFLKNADDYTNLFDWLNQKKEIKQDAFLKYPAFGLKKNVTNYRWNYVEDKTYPCNETHSRILLYWEKAGIDQSLLTTDMEEKLWHILYSISDKDELQKALHHFADKNKLGDTFADIFQQIPPFKKDYGSYSAKTIKRLLPLMRMGKYWHPESIDNATLTRIHQILNGEMDEVTASRIKEKTIHLDNLSSFQGLPTWLACYIVYNRHSEIKDITKWQQPSDIDAYLQSFKQHSLHNPIVEQIIMETLRTVRDIWKQIEHIDEIHIELGREMKNPADKRKKLTQQIQENENTNLRIKALLTEFANPEFEIENVRPHSPSQQDLLRIYEEEVLSESAKNMPEDIATILKKFNETDAKKRPSTSDVLRYKCWLEQKYRSPYTGAMIPLGKLFTPAYEIEHIIPQSRYFDDSFTNKVICEAEVNKLKGNMLGYEFIKNNPGKIVELGFGQKVKIQTVEAYELFVKEHYSYNPVKMKKLLMEDIPEQFIQRQLNDSRYISKFIKSLLSNIVREEGESEATSKNIIACTGSVTDRLKKDWGVNDVWNKIILPRFLRLNEITNSNHFTTTNTHNRIIPTMPLALQKGFNKKRIDHRHHAMDAIVIACANRNIVNYLNNESASENAKISRLDLRQILCTKTKTDASGNYQWIINKPWETFTQDVYTVLANIIVSFKQNLRIINKTTNHYFRYQNGKKVQCVQETGDSWAIRKPMHKETVYGEINLRKITTVPLKTALENPQRIVEKDLKKKIKELLQQRFNEKQIKKYFEENNEIWQDVNLKKIQFYSFTKEGKERFFASRESLDTSFNKKKIEEKIADTGIQQILLHHLEQNNNDPNQAFSPEGIEWMNKNIISLNNGKWHQPIYKVRTYEQAEKFRVGQTGNKSEKFVEAAKGTNLFFAIYETEHKRSFASVPLNVVIERLKKGLSPAPEDGKGNPPKYVLSPNDLVYVPTQEEVKCGHINQPIQKDRIYKMVSSSGNQCFFIKSSVANTIIDKYEYSPLNKMERAITGEMIKEICIPIKIDRLGNITSSISL

SEQ ID NO: 23760 - protein, 1432 aa, unidentified
  REGION 1..1432: note = Cas Enzyme sequence
MKRILGLDLGTSSIGWALVNESERAEEISSIVQLGVRVNPLTVGEMQNFEKGKSITTNADRTLKRSMRRNLQRYKLRRDVLIKLLKKVGFITDKTILSEQGNRTTFETYRLRAKAAEEEISLEELARVLLMINKKRGYKSSRKAKGEEDGSLIDGMEIAKKLYDEDLTPGQLCLQLLESGKKTFPDFYRSDLQDEFDRIWNFQKQFNPQSFCDTAKEEVKGKNKSQTWAILAKYFTWTKEVSVWNENEAKTENQEKEYRLVGLKRTVKGEELKKENYCWRVQALTERLDLEEIAVVLQEINGQISASSGYLGAISDRSKVLYFNHQTVGQYQMAELNKNPNMSLRNMVFYRQDYLDEFNAIWEKQAEFHKELTPELKKGIRDVIIFYQRRLKSQKGLIGFCEFENREIIVEKNGKTQTKIIGCKVIPRSHPLFQEFKIWQTLNNIEVFVGERKRKRKQTNVSSDLFDDTEDVLVTKGRRFLYQEEKEILAKELSIKENLKKAEVLKLLFENPQELDMNFKQIDGNRTGFALFSAYGRMIEKYGYEPLDFKKPADEIINQLKAVFSDLGWNTDLLSIGLDKEGKELEMQPYFRLWHLLYSFEGDNTPAGNGKLIEKIMQLCRVEKEYAIELANISFQDDYGSLSAKAIKKILPYLKEGNQYDVACEYAGYRHSKSSLTKEEIENKALKDKLDILPKNSLRNPVVEKILNQMVNVVNAVIDAYGRPDEIRVELARELKKSAKEREELTKAIAKNTREHDEIRKLLQSEFGMIHVSRNDIIRYKLYEELKENGYKTLYSNQYIPKEKLFSKEIDIEHIIPQARLFDDSLSNKTLEYKAINIEKGNKTAYDFVKDKYGEEGLQEYLNRCETVCNDKKAKLRKLKMQQNDIPDGFIDRDLRNTQYIAKKALSMLKDICRRVVATTGSITDKLREDWQLVDVMKELNLPKYEALGLVERFEDKDGRIIKRIKDWTKRNDHRHHAMDALTVAFTKDVFIQYFNNKNAAWESDCKEHANIIGIKTRYFESGRAVPPMPLGQFRVEAKSHLENLLVSIKAKNKVVTTNVNCIRKKGGISEKHQQTPRGQLHLETIYGSHKQYVTKMEKVNASFDVAKIATVSRQNYRNALLRRLEAFGNDPKKAFTGKNTLEKNPVYLDRAQTMRMPDRVQTVEFEAVYTIRKPIDSNLNVEKVVDAKVRAILEQRLEEYGGDAKKAFVNLDENPIWLNQEKGISIKRVSIRGINNAQSLHVKKDKNGNPILDENGKQIPVDFVNTGNNHHVAIYRKPVLDKKGQVMFDEDGNLMYELDEVVVSFFEAVTRANLGLPIINKDYRRSEGWQFLFSMKQNEYFVFPNEKTGFNPKEIDLLDPDNYAVISPNLFRVQKFSTKNYCFRHHLETDVQERKALLGITYKWQLGLKAIKDIVKVRINHIGQIVSVGEY

SEQ ID NO: 23761 - protein, 1431 aa, unidentified
  REGION 1..1431: note = Cas Enzyme sequence
MKTILGLDLGTNSIGWALVKQDFNNKRGQILGMGSRIIPMSQDILGEFGKGNSVSQTAERTNYRSARRLRERFLLRRERLHRVLNVLNFLPENYASQIDFTKRLGKFKDQSEPKLAYAEGSFIFKKSFHEMLEDFKVHQPQILRDENGRDRLIPYDWTLYYLRKKALTQKIDQGELSWILLNFNQKRGYYQLRGEEEEENPNKKTEFYSLKIIDVLADEPQRGKSDLWYSLVLENGWVYRRSSRMPLFDWKNKTRDFIVTTDLNDDGSIKKDKDGNEKRNFRVPAETDWTLVKKKTEHEINESHKTVGAYIYESLLRNPKQKIKGKLIRTIERKFYKAELQMILEKQKEFHPELQDDDVYNECTRELYRNNEAHQFILSKKDFIHLFLEDIIFYQRPLRSRKSSVSNCILEFRKYRGENGTEQTQYLKAIPKSNPFYQEFRIWQWLFNLNIYKREDDTNVTREFLSTTEDFENIFEFLNGRKEIDQKAVLKYLNISDKTYRWNYVEDKKYPCNETGAMISSRLEKVEGISAAFLTRENEQKIWHIIYSVNDKTEYEKALKTFAASHGLHDQSFFEAFRKFPPFKSEYGSFSEKAVKKLLSLMRVGKYWSYEAVDNSAKDRIRKIITGEYDENIRDKIREKAVHLTEEGDFQGLPLWLAQYVIYGRHSEAALAGKWNSADDLEKFLEDFRQHSLRNPIVEQVVTETLRVVKDIWMKYGSGTKDFFSEIHIELGREMKLPAADRKQLTGQISENENTNIRIKALLAEMMDDASVENVRPYSPMQQEILKIYEDGILKSDIDIDDDILKISKTAQPSPSDLKRYKLWLEQKYRSPYTGQIIPLNRLFTLEYEIEHIIPQSRYFDDSFSNKIICESAVNKLKDNYIGLGFIKKFGGTIVECGSGKTVKVFSADEYEDFVKKHYANNRGKRNKLLLEEVPEKMIERQMNDTRYISKYISGVLSHIVRVEDGTDEGVNSKNIIPGNGKITTQLKQDWGLNDVWNDLILPRFERMNHLTQSTDFTAWNTNHRKFLPTVPIEFSKGFSKKRIDHRHHAMDALVIACATRDHVNLLNNQSAKSETGRYDLKRKLMEFEKTAYTHPQTGERVERLVPKRFLKPWDTFTVDAKSSMETIIVSFKQNLRVINKATNHYEKYLEKDGVRIKEKTEQTGTNWAIRKSLHKDTVSGKVDLPWVKVPKGKIITATRRALDTSFDIKTINSITDTGIQKILKNYLEFKGSPEMAFSPEGIEDLNRNIEQFNDGKHHQPINKVRIFELGSKFQLGNSGNKKDKYVEAAKGSNLFFAVYSSGLKRSYETIPLNVVIERQKQGLPPVALAGKDDFYLCPNDLVYIPSADELENTYPVDFSDVSKENTEHIYKVVSFSGNQIFFVRHDVSTSIVNKAEFSALNKMERDMNGTMIKEVCIKLKVDRLGNILKG

SEQ ID NO: 23762 - protein, 1467 aa, unidentified
  REGION 1..1467: note = Cas Enzyme sequence
MMIKNILGLDLGTNSIGWALIKQNFENKYGEILGMGSRIIPMSQDVLGEFGKGNSVSQTAARTDYRGVRRLRERFLLRRERLHRVLNVLNFLPEHYASQIDFKKRFGKFKEETEPKLAYNNDGFIFKNSFEEMLTDFKNHQPQLLANNKKIPYDWTIYYLRKKALYHKIQKEELAWILLNFNQKRGYYQLRGEDFEDEKNKVFVRLKVDRIVDSGENIKGKILYDVYFENGWKYEKQIVKTEDWIGRTKEFIVTESILKNGDIKRTFKAVDSENDWIAIKTMTEQEIDKSHQTVGTYIYEALLQNPKQKIKGKLVRTIERKFYKEELKQILEKQKEFHHELQNDDLYNDCVRELYRNNESHQLTLSKKEFVHLFMDDIIFYQRPLRSQKSSISNCTLEFRKYRDENGVEHTQFLKAIPKSNPYYQEFRIWQWIFNLNIYKKDDDSNVTKEFLNTIEDFENLFEFLNNRKEIEQKPLLKFLLEQKDFKGKLLSAEIEKYRWNYVEDKKYPCNETRTMILSRLDKVENISIDFLTREFEQKIWHIIYSVNDKIEYEKALKTFAVKNNLDENSFLEVFRKFPPFKSEYGSFSEKAIKKLLPLMRLGKYWEYENINEHSKDRIQKIITGEFDENIKNRVREKSTHLKVENDFQGLQLWLAQYIVYGRHSEASMIGKWNSADDLEKFLNEFKQHSLRNPIVEQVITETLRVVKDIWLKYGKGAKDFFSEIHIELGREMKQTKDERADTTKRITENENTNLRIKALLAEMMNDNSVENVRPYSPMQHEILKIYEDGILRSDIEIDDDILKISKTAQPSSSDLKRYKLWLEQRYKSPYTGQIIPLNKLFTPEYEIEHIIPQSRYFDDSFNNKIICESAVNKLKDNYIGLGFIKQFGGTMVECGFGRSVKVFEAGEYEDFVKKHYANNRGKRSKLLLEDIPDKMIERQMNDTRHISKYISGVLSNIVRVEDGTDEGVNSKNVVSGNGKITSQLKQDWGLNDVWNELILPRFERMNQLTNSTDFTTWNENYQKFLPTVPVEFSKGFSKKRIDHRHHALDALVIACATKDHVNLLNNQSAKSDTKRYDLKKKLMKFEKSVYNHPQTNERIEREVPKHFLKPWENFTVEAKNNLEKIIVSFKQNLRVINKATNHYEKYVEKDGVKIKERVEQTGTNWAIRKPMHKEFVYAKVNLPWVKVSGKEILTAIRKPLDISFDEKKISNSITDTGIQKILLAHLKKYKGTLDDKGKEIAPEILAFTPEAIEEMNKNIIELNDGIFHQPIFKVRVFEKGTGRFSIGQSGNKKNKYVEAAKGTNLFFAIYEDKSGKRSYETIPLNEVIERQKQGLNSVPLENKKGHKLLFHLSPNDLVYVPEEGEFTGRVFNLNDLNKEQIKRIYKVEKTSGTECYFVRQDIAFLIKQYDAKTKIGELESQNKLQVTMSEDRTKIADVCLKIDCDRLGDINILTKEKIKKMFDEYR

SEQ ID NO: 23763 - protein, 1429 aa, unidentified
  REGION 1..1429: note = Cas Enzyme sequence
MAKNILGLDLGTNSIGWALINQDFENKQGKILGMGSRIIPMSQDILGDFGKGNSVSQTAARTGYRGVRRLRERFLLRRERLHRVLNIINYLPEHYASQIDFEKRFGKFKEETEPKLAYNKDGFVFKNSFEEMLADFKNSQPQLLENDKKIPYDWTIYYLRKKALSQKIEKEELAWILLNFNQKRGYYQLRGEEEEENPNKLVEFYSLKIVDVLADEPQKGKSDIWYSLVLENGWVYRRASKTPLFDWKDKTRDFIVTTDLNDDGSIKTDKDGNEKRSFRAPAETDWTLVKKKTEQEIDKSHKTVGVYIYEALLQNPKQKIKGKLVRTIERKFYKDELKQILEKQKEFHQELKNDDLYNDCVRELYRNNEAHQLTLSKKEFVHLLMEDIIFYQRPLRSQKSSISNCSLESRKYKDENGVEHIQFLKTIPKSNPYYQEFRIWQWIFNLNIYKKDDDANVTKEFLNTTENFENLFEFLNNRKEVDQKALLKHFKLNEKTYRWNFVEDKKYPCNETKTMISSRLDKVENISDDFFTRETEQKIWHIIYSVNDKMEYEKALKSFARKNNLDENSFFEAFKKFPPFKSEYGSFSEKAIKKLLPLMRLGKYWNYADIDKYSKDRIQKIINGEFDENIKDKVREKAVHLTSENDFQGLQLWLAQYVVYGRHSEASIIGKWNSTDDLEEFLKEFKQHSLRNPIVEQVITETLRVVKDIWIKYGNGAKDFFNEIHIELGREMKLPADEREQLTRQISENENTNLRIKALLAEMMTDNSVENVRPYSPMQQEILKIYEDGILKSDIEIEDDILKISKTAQPSSSDLKRYKLWLEQRYKSPYTGQIIPLNKLFTPEYEIEHIIPQSRYFDDSFSNKIICESAVNKLKDNYIGLGFIKQFGGTIVECGLGKNVKVFEVDEYEDFVKKHYANNRGKRNKLLLEEIPEKMIERQLNDTRHISKYISGVLSNIVRVEDGSDEGVNSKNIVPGNGKITTQLKQDWGLNDVWNDLILPRFERMNQLTNSTDFTAWNENHQKYLPTVPIEFSKGFSKKRIDHRHHALDALVIACATKDHVNLLNNQSAKSDTKRYDLKKKLMKFEKAVYKHPQTGERIERDVPKQFLKPWESFTIDAKNNLDKIIVSFKQNLRVINKATNYYEKYVEKDGIKTKERVQQTGTNWAIRKPMHKETVSGKIDLPWVKVPKGKILTATRKSLDTSFDLKSINSITDTGIQKILRNYLEFKDSAEAAFSPEGIEDMNKNIEKYNDGKLHQPINKVRVFELGSKFQVGQTGNKKDKYVEAAKGTNLFFAVYEDKNGKRIYETIPLNIVIERQKQGLSVVDLKGVNDFYLCPNDLVYIPSEDELENVNNIDFKNFTKEKNERIYKVVSFSGSQIFFVRQDVSTSVVNKAEFSTLNKMERAIDGSMIKEHCLKLNVDRLGNISKT

SEQ ID NO: 23764 - protein, 1419 aa, unidentified
  REGION 1..1419: note = Cas Enzyme sequence
MTKNILGLDLGTNSIGWALVKQDFENKQGEILGMGSRIIPMSQDILGDFGKGNSVSQTAERTRYRSVRRLRERFLLRRERLHRVLNVLNFLPEHYSSQIDFEKRLGKFKAETEPKLAWENNDGQFSFLFQTSFNEMLGDFKANGQELKIPYDWTIYYLRKKALSQKIGKEELAWILLNFNQKRGYYQLRGEEEEENPNKLVEFYSLKIVDVLADEPQRGKSEVWYSWVLENGWTYRRSSKTPLFDWKDKTRDFIVTTDLNNDGSIKTDKDGNEKRSFRAPSENDWTLVKKKTEQEIDKSHKTVGTYIYETLLQDPKQKIRGKLVRTIERKFYKQELKQILEKQKEFHPELQSDDLYNDCIRELYRNNEAHQLTLSNKDFIHLFMEDIIFYQRPLRSQKSSISNCSLEFRTYKDENGVEHTQYLKAIPKSNPYYQEFRIWQWIFNLNIYQKDNDENVTKDFLSTTKDYGNLFEFLNNRKEVDQKALLKHFKLSDKTYRWNFVEDKKYPCNETKTMISSRLDKVEGITDDFLTRECERKIWHIIYSVNDKLEYEKALRSFAGKYHLDEISFFEAFKKFPPFKSEYGSFSEKAIKKLLPLMRLGKYWNYADIDKASKDRIQKIINGEYDENIKDKVREKAVHLTAENDFQGLQLWLAQYIVYGRHSEASIIGKWNSADDLEEFLKDFKQHSLRNPIVEQVITETLRVVKDIWVKYGNGAKDFFSEIHIELGREMKLPAEEREQLTRQISENENTNLRIKALLAEMMNDGSVENVRPYSPMQQEILKIYEDGILKSDIEIEDDILKISKTAQPSSSDLKRYKLWLEQKYKSPYTGQIIPLNKLFTPEYEIEHIIPQSRYFDDSFSNKVICESAVNTLKGNYIGLEFIKKLGGTVVECGNRRSVTVLKQDEYEDFVKQLYARNRGKRNKLLMEDIPEKMIERQMNDTRHISKYISGLLSNIVRVEDGTDEGINSKNIIPGNGKITTRLKQDWGLNDVWNDLILPRFERMNQLTKSTDFTAWNENHQKFLPTVPIEFSKGFSKKRIDHRHHALDALVISCATRDHVNLLNNQSAKSDLKRYDLQYKLRHTEKWIDKDGRERDKFTEFKKPWEHFTVDAKNNLEKIIVSFKQKLRVINKATNYYEKYEESDGLKTKEKIKQTGTNWAIRKPMHKDTVSGKIDLPWMKVPKGKILTATRKNLDISFDLKSISSITDTGIQKILKNYLNFKGSSEIAFSPEGIEDLNKNIEKYNDGKPHQPINKVRVFELGSKFQVGQSGNKKDKYVEAAKGTNLFFAIYEDENGKKTYDSIPLNEVIERQKQGLPTVDFKDKKGIYLSPNDLVYLPTDDEVENIGGIDFNHLSAERKRNIYKVVSFTGSRLYTTPFQVATAIVNKVEYTQLNKIEFTKEKESCIKIKVDRLGNISKA

SEQ ID NO: 23765 - protein, 1111 aa, unidentified
  REGION 1..1111: note = Cas Enzyme sequence
YLAIVLQDINSEINKSSGYLSEISDRSKELHFNNMTVGEYQYKQIAKNPHNSLKNQVFYRQDYLNEFQKIWEKQAEFYPELTNELRDKIQNEIIFYQRRLKSQKGLISYCEFESWEQEVIIDGEKKNKIVGHRVVPKSSPLFQEFKVWQNLNSVRITNVKTNEVYHIEEETNKELFQTLNWIDKLTDKQFLKELGLKPNEWKINFKTVEGNRTNYNLLKTYKEILRIEGYDNIDYSKIDAEDLIEILKKCFDEIGIDKGILEFTSTLKGNPFSKQESYELWHLLYSYEDDFTRTGTESLEQKLKSTFGFKDEHLHSLINISFQDDYGSLSARAIRKILPYLEDGKLYSEACELAGYNHSNSITKKQNEERELKPKLEILKKNSLRNPVVEKILNQCINVVNAIIEDSEMGRPDEIRIELARELKNTKEQRSEMTKAIGRATKDHEKYRDEIKSKFGLPHVSRNDLIRYKLYKELETNGYRTLYTDEYIKPEDLFSKKYDIEHIIPKSRLFDDSFSNKTLETRKSNLDKGDETALDFVGRKYGKEGLEKYRKRVEELFKAGKIKYSKQNKLLMSLNDIPEDFLNRDLGTSAYIAKKAAEILLDITRRVSLTSGKITSKLREDWGLIQVMQELNWDKYEKVGLTYYKENKEGKKLPRIKDWTKRNDHRHHAMDAITVAFTKPGIIQYLNNLNAKSNKEIYKLENAYTFKDERGKRKFIAPFPTIRKASKEQLSQILISFKTKNKVTTKNKNKINIEGNNKFKYQTVETPRGQLHKETVYGKSNYYETKLEKVGGKFDQDYIKLVANQSYRAALLTRLEEFENDAKKAFTGKNSLTKNPIYLNGTQETVPEKVKLAWLEEQFTIRKEVTPDLKIDKVVDEGVKKILKKRLKDFNNKPKEAFSDLDLNPIWLNKEKGIKIKRVKITGVSNAEPLHHSKNHFGVEMLDNNGSPFPNDYVSTGNNHHVAIYRDEKGNLQEEVVSFYEAVTRKNIGLPIINKQHEKGWQFLFTMKQNEMFVFPNEKIGFNPHEIDLLKPENNALISKNLFRVQKFSLIYYGNSAVRDYVFRHHLETQLLDLKATKDITWRALKSSSLLDKIVKIRINHLGNIVHVGEY

SEQ ID NO: 23766 - protein, 1214 aa, unidentified
  REGION 1..1214: note = Cas Enzyme sequence
MEQTIWAFDLGKGSIGEAVRQKLDFPHKESLLIPPDLARRGPSTVSGTPACRYRAMKTREAHHERERWLETVWKAMGLAPLDAREVWENPATGKWELKRKADYRLEREFAPKIGEKTKDGAPSDAAGANVCYTSCLLRIRLLQGDKSLAEWQVYKALRAALQHRGYGRVPWAAKEARKQGRTPEELQQEEEKQLQQADPCYRDAVGRWPEFKRSVSIEFHLPCYYDALKMGLWNPSDPHRLLERASHLTGSTRNVRLDRVDVRAELVRLGDKAAGILSPLRDAFARWQQDGWKNRHPVTGAGLTYPVVAKTFGEFLCDGPAGKPDETSFEAFLSQRREADVRRGSFEEWMGALGQKTPSFDNRILNDCVLIPRYHVCRVDVRLETSKDGKPTGKFAPESLLATEVTFLLKLKNLLVAAVPFGQRKLTVEEIRAIFDYAHCQLKALKLVNAEGELTKNWPGKVADCFSLSQSEWGKDKALGKLRVRPMPGHEEVQAPKPSGRSGYSRVALRILKELILSGEAPSAFHARLLRRDLELLRRLGSSPQKTLALFDDSIAADEQQRKREDTDNRKSGLLASELHFLLQMRKDLAGSDSWENIFIPSQTLDALQLRHTNAGKLNADAAIRDLLGTVNDPIVRHRLQVFAKRLKKLQHGDKRENLPGFGVPDVIVLEFVREDFMGEQAKRDYQKFINDREKERRAAREEAEKLGLESRSSGLRYELFKAQGGICLYTGKPLSETRLDEYEIDHIVPRSLGGPDAAVNYVLTFHDINSTKEKGKLTPFALLRGKEGWDAYVKRVGSRASTLRNKKVQLLTREDAPELVERYTALAETAWVSKLAQTILNLHFGWTNGYDDQRQKRVIVVSGGLTARVRRKYGLDKLLYSDVTDPEILARRIKNREDKRHHALDAMVLTFIPQWARDPNKEGFFRFPAEFRDSTGRENYQSVRELFQKHIAQVMPRQIAYERPALADTSFGLRCDAGKPVIVKRISVFDLAQEPAGAPGKTKFSLRYLTKKIESIRDDTIRRRLKVDFLGGGPNETSWKKYCDSFAQIRKGGTLGARIIKVWVNVGEPNEFKDLSKDSSGAWRKAKDDHQGQIIYTDADGNLAVKPVYAHASIKHEKQRIAGIGGKSKVHCFVRSKCLIRLRKELPQADYKLVIRNEQKQKRRVPAKTPLQPATFMLNTIITGSMDVEFTAANGQRLVAALPALVDVGFEPL

SEQ ID NO: 23767 - protein, 1216 aa, unidentified
  REGION 1..1216: note = Cas Enzyme sequence
DHDLTPGEFSFTLLKDGKKSLPDYYRSDLENEFNKVWNHQKKYYPEALTAELFKEVEGKNKNQTWKICEKPFSIKGIKIDGSKADKKLETYKLRKLALSEKIGLEYLAIVLQDINSEINKSSGYLSEISDRSKELHFNNMTVGEYQYRQIAKNPHNSLKNQVFYRQDYLNEFQKIWGKQAEFYPELTNELRDKIQNEIIFYQRRLKSQKGLISYCEFESWEQEVIIDGEKKNKIVGHRVVPKSSPLFQEFKVWQNLNSVRITNVKTNEVYHIEEETNKELFQTLNWIDKLTDKQFLKELGLKPNEWKINFKTVEGNRTNYNLLKTYKEILRIEGYDNIDYSKIDAEDLIEILKKCFDEIGIDKGILEFTSTLKGNPFSKQESYELWHLLYSYEDDFTRTGTESLEQKLKSTFGFKDEHLHSLINISFQDDYGSLSARAIRKILPYLEDGKLYSEACELAGYNHSNSITKKQNEERELKPKLEILKKNSLRNPVVEKILNQCINVVNAIIEDSEMGRPDEIRIELARELKNTKEQRSEMTKAIGRATKDHEKYRDEIKSKFGLPHVSRNDLIRYKLYKELETNGYRTLYTDEYIKPEDLFSKKYDIEHIIPKSRLFDDSFSNKTLETRKSNLDKGDETALDFVGRKYGKEGLEKYRNRVEALYKSGKIKGSKHRKLLMGLKDIPEDFLNRDLGTSAYIAKKAAEILLDITRRVSLTSGKITSKLREDWGLIQVMQELNWDKYEKVGLTYYKENKEGKKLPRIKDWTKRNDHRHHAMDAITVAFTKPGIIQYLNNLNAKSNKEIYKLENAYTFKDERGKRKFIAPFPTIRKASKEQLSQILISFKTKNKVTTKNKNKINIEGNNKFKYQTVETPRGQLHKETVYGKSNYYETKLEKVGGKFDQDYIKLVANQSYRAALLTRLEEFENDAKKAFTGKNSLTKNPIYLNGTQETVPEKVKLAWLEEQFTIRKEVTPDLKIDKVVDEGVKKILKKRLKDFNNKPKEAFSDLDLNPIWLNKEKGIKIKRVKITGVFNAEPLHHSKNHFGVEMLDNNGSPFPNDYVSTGNNHHVAIYRDEKGNLQEEVVSFYEAVTRKNIGLPIINKQHEKGWQFLFTMKQNEMFVFPNEKIGFNPHEIDLLKPENNALISKNLFRVQKFSLIYYGNSAVRDYVFRHHLETQLLDLKATKDITWRALKSSSLLDKIVKIRINHLGNIVHVGEY

SEQ ID NO: 23768 - protein, 911 aa, unidentified
  REGION 1..911: note = Cas Enzyme sequence
VLYNAFYKIADAHGYGHDWDKKSVSEIKIELIAIFSDVGINPKILEFDSTLSGKELENQASFQLWHLLYSAEEDVKINEEDKIKYGNSDVGLKKNLQAKFGFAPEDTKIIASISFPQDYGNLSSKALRKILPELKKGYEYSDACKNVGYNHSKSLTADDLEKRILKDKLEILKKNSLRNPVVEKILNQTVNVVNQIIAQFGKPDEIRIELARELKKSAKQRSEMTKGIADATRRNDDIKKLIAKEFGIPNPSKNDVIRYKLYDELSTNGYKSLFSDRLIKIEDVFSKKIDIEHIIPKALIFDDSFSNKTLAYREVNLEKDKSTAFDYITNYKNLEVESYTERVETLFKSGSISRAKRMKLLMSAKDLPKDFIERDLRNSQYIAKKAKEMLFEVIRNVVSTSGSITDKLREDWDLINVMKELNFPKYEALGLIEIEKRYNKGTEKYTERKVIKDWSKRNDHRHHAMDALTVAFTKHNHIQYINNLSARYNTNHQMHSRILNIQSSITEMVSSNNGSKKRRFTAPMENFRTEAKKHIEAILISFKNKNKVVTQNINIYKAGKEERKKIQLTPRGQLHKETIYGKIKRPEPKATKINANFDFEKALTIMNPTQRELVINHLKTYNNKHKVAFSSKEIKSKPLIHKNKPLTEVICFEEIYTIRKGINPDNFKTQKNIEKVIDVKTKEILSKRLNEYNNDPKKAFSDLDKKPIWLNKDKGVKIKSVAITGVNNVEALHAKKDHFGKPILDENGNEIAVDFVSTGNNHHVAIYKDEKGNLHENVISFYEAVERSNQGLPVIDKFYNSELGWEFQFTMKQNEMFVFANDNFDVNEINLMDENNSTLISKYLFRVQKISTKNYMFTHHLETQATNSDDLKNKKMLSGLKYNSIRSPDSLSRLLKIRINHLGQIVQVGEY

SEQ ID NO: 23769 - protein, 1034 aa, unidentified
  REGION 1..1034: note = Cas Enzyme sequence
VYDIWHAVFHFDEEYLEKLAKTNFKIGNVEVTRNKKKIEISPLVLLKKSLMLGYADLSLKVMRKIIPFLREGFIYNKAVLLAKLPELLDDKWDDNKDLIINVINDSNEKYNFQKTIVSIANKLIEKHKALEYPNNFAYKDFDYILDSSDENDICGACEGYFGEKTWESIANRNIYIQEVGLLYQEYFSDSKRAYRETQTLKDLVEKEFKELGLYLNGELYHHSMRKNIYGNPIKYNKSGVMIDVLPEPRIDSIRNPMFNKSMSILRKLINELIVSGDIDNDTEIIIEIARELNDNNKRAAIERFQNQRKSKREKYRAFLNEFKERENSSINVDQSISTFELWSEQIFDDKEGKNIKELRTDSILNEKDALKRYELWTEQKGQCIYTGKMISISQLFSNEIDIEHTVPRSILPDNTMANQTVCYAKYNRDVKKNKIPYDCENFSISTPNGSSIELRLDVWKQIRDNYKELFEKRRKPFGGEDENKKNKRIQEKHFYRMHFDYWRDKINRFEAKEIKDSWARRQLVDTQMVSKYAREFLKTYFKKVSVQKGQVTAEFRKMFGFQEEDEIKSRNKHTHHAIDAAVLTLIPVNSSKREEILKKHFEAKESGKKVSQMRPFKDFNSQNLIKNIENNILIVNYQKDKIIQQTKKVVRNRGEIEYLKNKKGDFILNEDGGKVKKTSQGDSIRSTLFKQTYIGKIKAIERDENGKPVRENGNWKYKTGDDEFIYTERKPIKEVLKKTIDIVDPDIRKLVEKQKGNDDIFDFQGNKMRHVRIKVRAGKKVKERINYRSKHEHKNHFYSASGSIPYAVMLHKNEEDTVERKMIPISSYQIAEVFRKTRKFDEVEFVKEYYPEYESYDKKLLKIGQKVFVLQDDEEYNQRIEKEFQRNRFYKITQFKYDGSKIMLQYHLEAQSKSDIDKSIKADKNDILMKYEKSLNIPLITLDKSIIDNNDRNKDYEKRLFDFNKRLKTLENKAGKDLMSKAKKEIEIFKTESSSILAEELTPPILGLSLKNWNFLYEDYDFSINLKGEIKWIE

SEQ ID NO: 23770 - protein, 955 aa, unidentified
  REGION 1..955: note = Cas Enzyme sequence
TNVKTNEVYHIEEETNKELFQTLNWIDKLTDKQFLKELGLKPNEWKINFKTVEGNRTNYNLLKTYKEILRIEGYDNIDYSKIDAEDLIEILKKCFDEIGIDKGILEFTSTLKGNPFSKQESYELWHLLYSYEDDFTRTGTESLEQKLKSTFGFKDEHLHSLINISFQDDYGSLSARAIRKILPYLEDGKLYSEACELAGYNHSNSITKKQNEERELKPKLEILKKNSLRNPVVEKILNQCINVVNAIIEDSEMGRPDEIRIELARELKNTKEQRSEMTKAIGRATKDHEKYRDEIKSKFGLPHVSRNDLIRYKLYKELETNGYRTLYTDEYIKPEDLFSKKYDIEHIIPKSRLFDDSFSNKTLETRKSNLDKGDETALDFVGRKYGKEGLEKYRKRVEELFKAGKIKYSKQNKLLMSLNDIPEDFLNRDLGTSAYIAKKAAEILLDITRRVSLTSGKITSKLREDWGLIQVMQELNWDKYEKVGLTYYKENKEGKKLPRIKDWTKRNDHRHHAMDAITVAFTKPGIIQYLNNLNAKSNKEIYKLENAYTFKDERGKRKFIAPFPTIRKASKEQLSQILISFKTKNKVTTKNKNKINIEGNNKFKYQTVETPRGQLHKETVYGKSNYYETKLEKVGGKFDQDYIKLVANQSYRAALLTRLEEFENDAKKAFTGKNSLTKNPIYLNGTQETVPEKVKLAWLEEQFTIRKEVTPDLKIDKVVDEGVKKILKKRLKDFNNKPKEAFSDLDLNPIWLNKEKGIKIKRVKITGVSNAEPLHHSKNHFGVEMLDNNGSPFPNDYVSTGNNHHVAIYRDEKGNLQEEVVSFYEAVTRKNIGLPIINKQHEKGWQFLFTMKQNEMFVFPNEKIGFNPHEIDLLKPENNALISKNLFRVQKFSLIYYGNSAVRDYVFRHHLETQLLDLKATKDITWRALKSSSLLDKIVKIRINHLGNIVHVGEY

SEQ ID NO: 23771 - protein, 1374 aa, unidentified
  REGION 1..1374: note = Cas Enzyme sequence
MITRYGNYMTNSITFIFQSPFLEMIEAFKANGHTEKIPYDWTIYYLRKKALTQKIEKEELAWILLNFNQKRGYYQLRGEEEVDKNKKFEQLQVKDVIDSGQKVKGNILYDITFENGWEYDNQITKKEDWIGKTREFIVTTTIRKDGTIKRSYKKVNSEEDWLAIKEKTQNEVDAYNDKNQTFGIGCYIFDALLKKPTQKIRGKLVKTIERKYYKEELEKILRTQVNFHPDVFNDKALKKCIEELYSRNEAHQKMLLTKDFKYLFVNDIIFYQRPLKSKKSSIADCTYENRFYKKEDEIIKQPLKCIPKSNPLFQEFRLWQFIHNLKIYQKDGDVNGKVTIDIDVTSKFLTNDEDYSFLFTKLNNTKEINQKQFLAIFKLKETTHRWNYPENKKYPCNDTCSQISSRLSKIDGVDVDLFLTTERLQNLWHLIYSVTDKKDYEKALKTFAQKNDLPEDDFVENFKRFPPFESAYGAYSEKAIKKLLPLMRMGKYWDSSKISNDVKNRIESIVSRLNEIDYKIEKLDTISDDAVPKRLLKSFAKAKNRENPLKGLNTYQACYAVYNRHSEIGEIVQWKQPEDISNYLKKFKQHSLRNPVVEKIILETLRVVKDIWTTYSEKEFVNGQEKYKPFFDEIHVELGREMKNDKKTRERISKSNTERENTNERIKAILEELKNDPNIADDVRPYSPSHQEILKIYEDGLFSSLNEVADSIEKIRKNNKPTKAEIIKYKLWLEQGYISPYTGKIIPLTKLFSTDYQIEHIIPQSRYFDNSMNNKIICESAVNEEKDNKTAYEFLKDFGGSLIDLGHGKSVQLLSIENYEDHCQIYFRKNKSKLERLLSEDIPEGFISRQLNDSRYISKVVKGLLSNIVREDGELEATSKNLVPVTGAITSKLKNDWGLNNKWNEIIAPRFIRLNELTQSKDFGYWDEKINAFRIQVPKELERNFNKKRIDHRHHALDALVIACTTKDHINYITSLNTARNNHSLVGKIRATVKIVDKKGKERTVAKEYLKPWDGFTAAAKTSLERTMVSFKKNNRVINKTNNKTWQWVNEKGHLKKKLVKQEKGQNWAIRKPLHKATFYGKIEGFKTPRGKITTATRKPLSEITNERQLNTITDSGIVKILKNHLKSYIDENEKENYEMAFNQDGVEVLNNNIQKLNDGKKHQPIKKIRMFTHNTMFPVGDEGAKSTKYVIPEAGTNLFFNVYWDEKKQKRNFETVPLHKVIEFQKQNASLAKKDRTEAPIDNMLGNYLFTLSPDDLVYLPSEDELENNAAHQFIVLNNEQISNIYKFVDSSGITGNFVPFTASTVIANFKGKEIRSSFCKRNNLSEKDLIKNEFGLGSPQLKNQNSLTGKQVKSICWKLEVDRLGNITKIVK

SEQ ID NO: 23772 - protein, 1429 aa, unidentified
  REGION 1..1429: note = Cas Enzyme sequence
MAKNILGLDLGTNSIGWALIKQDFANKQGNILGMGSRIIPMSQDVLGDFGKGNSVSQTAARTGYRGVRRLRERFLLRRERLHRVLNIINYLPEHYASQIDFEKRFGKFKEETEPKLAYNKDGFVFKNSFEEMLADFKNSQPQLLENDKKIPYDWTIYYLRKKALSQKIEKEELAWILLNFNQKRGYYQLRGEEEEENPNKLVEFYSLKIVDVLADEPQKGKSDIWYSLVLENGWVYRRASKTPLFDWKDKTRDFIVTTDLNDDGSIKTDKDGNEKRSFRAPAETDWTLVKKKTEQEIDKSHKTVGVYIYEALLQNPKQKIKGKLVRTIERKFYKDELKQILEKQKEFHQELKNDDLYNDCVRELYRNNEAHQLTLSKKEFVHLLMEDIIFYQRPLRSQKSSISNCSLESRKYKDENGVEHIQFLKAIPKSNPYYQEFRIWQWIFNLNIYKKDDDSNVTKEFLDTIENFESLFEFLNNRKEVDQKALLKHFKLNEKTYRWNFVEDKKYPCNETKTMISSRLDKVENISDDFFTRETEQKIWHIIYSVNDKMEYEKALKSFARKNNLDENSFFEAFKKFPPFKSEYGSFSEKAIKKLLPLMRLGKYWNYADIDKYSKDRIQKIINGEFDENIKDKVREKAVHLTSENDFQGLQLWLAQYVVYGRHSEASIIGKWNSTDDLEEFLKEFKQHSLRNPIVEQVITETLRVVKDIWIKYGNGAKDFFNEIHIELGREMKLPADEREQLTRQISENENTNLRIKALLAEMMTDNSVENVRPYSPMQQEILKIYEDGILKSDIEIEDDILKISKTAQPSSSDLKRYKLWLEQRYKSPYTGQIIPLNKLFTPEYEIEHIIPQSRYFDDSFSNKIICESAVNKLKDNYIGLGFIKQFGGTIVECGLGKNVKVFEVDEYEDFVKKHYANNRGKRNKLLLEEIPEKMIERQLNDTRHISKYISGVLSNIVRVEDGSDEGVNSKNIVPGNGKITTQLKQDWGLNDVWNDLILPRFERMNQLTNSTDFTAWNENHQKYLPTVPIKESKGFSKKRIDHRHHALDALVIACATKDHVNLLNNQSAKSDTKRYDLKKKLMKFEKAVYKHPQTGERIERDVPKQFLKPWESFTIDAKNNLDKIIVSFKQNLRVINKATNYYEKYVEKDGIKTKEIIEQTGTNWAIRKPMHKETVSGKIDLPWVKVPKGKILTATRKSLDTSFDLKSINSITDTGIQKILRNYLEFKGSAEAAFSPEGIEDMNKNIEKYNDGKLHQPINKVRVFELGSKFQVGQTGNKKDKYVEAAKGTNLFFAVYEDKNGKRIYETIPLNIVIERQKQGLSVVDLKGVNDFYLCPNDLVYIPSEDELENVNNIDFKNFTKEKNERIYKVVSFSGSQIFFVRQDVSTSVVNKAEFSTLNKMERAIDGSMIKEHCLKLNVDRLGNISKT

SEQ ID NO: 23773 - protein, 923 aa, unidentified
  REGION 1..923: note = Cas Enzyme sequence
LQFNVNIVPSKHNAILVDKKTGEILAEEEALQLNAYLEQEPFYQLWHTIYSIKDSTECRIALMNRFGFEAGIADKLSRIDFNKQAFGNKSNKAMRKILPYLMQGYDYSQACSFAGYNHSNSLTKQEQEEQKVDERLELLPKNSLRQPVVEKILNQMINVVNSILDKYGKPEEIRIELARELKQSKDERNDADIYNANNKKLNDEIAHRLTDLGIPNTKRYIQKYKFIFPTRDKKLKESQVTNQCIYCGNTFSLSEALSGDNFDVDHIVPKALLFDDSQTNKVLVHRSCNAAKTNHTAYDYISNKGEEELCTYLNRVDEWFKRGILSYGKMQRLKVSFKEYTERKKLKKETEADKKLWESFIDRQLRETQYIVRKSKEILQKICKNVTTTEGTVTAKLRELWGWDDVLMNLQLPKYKEIPGQTIIKEWTSAHGKLKHQKEEIDNWGKRDDHRHHAIDALVIACTKQGFIQRINTLSSSETKDEMIKEIDKAKMKFGEKYDEKILNATNPLVKNHREKNSTLDAYLISQRPDNFTTKYVEQETDKILISFKAGKKVATNGVRKIKVNGKKKIVQSDIIVPRGALHEQFVYGKIKTITKDFKTNTYIKFPVKYLFENYNLIVNKKIKTVITERLIEYNNNVFDAIKSLKLSPLYIDKDKTQLLDSAYCYKDEFVIKYKIIDFKKDDVKYIVDEKVKQLVKSRLEEHDNKEKEAFKDVLWFNEAKQIPILTIRCFTGLTAVEAIKKDENGKEIGFAKTGNNHHIAIYQDTEGKFIQHLCTFWHAVERKKHKIPYIINNTNSLWSNLLNNDLPQVFLDKLPPDNLKLQFSLQQNETFILGLSNEAVEEAIEQNNKQLLSKHLYLVWSVSDTDYWFRHHLETKNSELKSIMSAKESNRYYRFKSIGALNKINPVKVRLNHLGEITKVGE

SEQ ID NO: 23774 - protein, 1659 aa, unidentified
  REGION 1..1659: note = Cas Enzyme sequence
MEDLKLKKVLGLDIGSNSIGAALVEVPEKNEEYGKFGRIIFTTSRIILTDTNLLIEQREKLETPAKSRTAKRSMRRRIERYKLRRARLTMVLRHLGWLPQDFPPFESPSKIKNKLFEILNTPKELREHNINYYSLKISDFLKPSDESIQEFYQEFGIDYNISKEFKKLPDDWIVYYLRKKGLHKKLSYSELALILYMLNQRRGFKSSRKDLKDTEQVPYEKFEETIKEKPDSKIETKFATITKIVKVEPVYDEEGKPKISKGKTIYRINVDDERVEPWDDNFEKEPKIVGKEVTLVVTKKYDKGKITQLKPKEPDENNWDLCVVAQDNKMGLKHPGEYFFDEILRAYKDNKHVKIRQYAVYRAKYIKEITEIWKKQLELNPELATLNQNKQLMAELAQILYPAQSKIKAGKYLEFLNNDLFHVIFNDIIYYHRKLKSQKHLISECPFERRQAIKIDKNGKKILYDIRGLKCIPKSSPLFQEFVAWKNINNLKLYLIEGKYDVDVTEKYLTEDVKEKLFEVFKRKSEVKINDILKTINEVIPDSVNYIRNNKKKGEEYNVRINLVNKDGEIKGNQTVSHYLNLLSKITDKSNDIISDDEFIYKLWHLEYSQNASTLDDLKENLSKGLRKIAINYPEIVEKADELADLMSKSSLIGDKDYGGFSALAIKKMLIVMRCGKYWKDPDILIQEFKQKLNNETNKKRAKEITNFITFLEKVKEQAQNIKQRIDLIRNRTLKIEEVADDIVKKQVIKSFMEKENLEDFYKGLKEHQATYLIYDQHSEKRFQKYLSYEDISKSINELEKSAIKNPIVKSVIRETLLLIRDIWEKFGYIDEIHIELARELRASSEQRKQIAENMRNKEKERERARQMLIELVNKGYFKNSVIPNPNRNDDIRKFLIYEQQVKGFYNKPKDKEFLTYAAWLEQNCISPYTGKTIPLSKLFDGTLYQLEHIIPRARYFDNSLSNLVVCESYINKAKGNQLAAVFIKNSNGRCKDGDKFYDLLTYDDYVAQCKNLFYYKNKAKYKNLLAEEVPENFISRQLNDTRYINRKLAEMLRPIPRDEQGVIVTTGSITDMLKRDWGLESLWKDMMVPRFKRMERILENELDKDDISDEKRKYLEEKLALIKKNLYFITKHNDTIIEEPELAPNEKIDIKRLDHRHHALDAIVIALTNRRHIQLINTIHAMDESKKPSYNNNNDDFGKIYKYLEKEDKIKYTLPWINLPFDTKNALDECMVTFKAKNKFITKPVNKILKWVEQNGRLEKAFVSQEKNPRWMAVRCQIFKEQPFGPIWIKYVEQKSLSDAIKIELKRKIEKASHLEVGYVYDKHAREVIKRFIDEITNEVGFQKIEDYSNLILKQIPKKGKNYILDGIEYEKIPVAKFELNKAKRKALSKEMNIKYLRDKVPYFFLDKEIFEKYRDSYPKVYQKYLNSLEDKKNTIAYELILEHLIQYNDDASKAFSTEGQEELNKRALANPKFQKTINAVTILDGELDKKMLRYNSYFETDTNVYFTIAEDPKTKERTNNKSIRIIEVLDSKLNGKPLFEIEDGKKLLVFKPYDIVYVPTKEEIEQIKSGAEINEVIDWNNKKKIIERCYYLASTAENTFKAKILTFANFLIKPEKGFSGEVGWENKTKVALDEDTDIAKNCIKLKVNRLGNFEPIL

SEQ ID NO: 23775 - protein, 1506 aa, unidentified
  REGION 1..1506: note = Cas Enzyme sequence
MGKTILGLDLGTNSIGWALVEQDFEKKEGQILGLGSRIIPMSQDILGEFERGNSISQTAERTRLRGMRRLRERHLLRRERLHRILNVLGFLPQHYVNKIDFDVRLGKFLPETETKPVYDDNGNFIFKDSFEEMLADFRKCQPQLLNRKNKKGEDAKVPYDWTIYHLRKKALTKRIENEELAWLLLHFNQKRGYYQSRGEEAEDKPNKLEEFYSLKVVDVTADEPQKGKNEIWYNIILENGWVYRRASKLPLFDWKDKIRDFIVTTDLNEDSSIKKDKEGKEKRSFRSPKEDDWQLLKKKTENDIEKSDKTVGEYIYDALLQKPNQKIKGKLIRTIERKFYKNELEQILKKQIELHGSLQDRNLYQQCVEELYPHNLHHQSTLLNKDFLHLFVEDILYYQRPLRSQKSSISNCPLESRTFILEGVKKIEPLKCISKSHPLYQEFRLWQWIMNLRIANKRNETNETEKYLHTIDDFTTLFDFLNERKEIDQKSLLKQFKLKESNYRWNYVEDKKYPCNETRSMIVSRLEKANDVPQGFLTKKTEEELWHIIYSVTDKIEYEKALNSFAHKNALNSESFYDAFKKFPPFPSNYGSYSAKAIKKLLPLMRMGKYWNEENIDEKTKDRITKIINAEVDETIEERVREKVKNLTQTEHFQGLPEWLAKYVVYNRHSERSDTGKWKTVQDLEEYLKSFRQHSLKNTIVEQVMTETLRTVKDIWQHYGNGAEGFFDEIHIELGRDMKNPAVERKRITEQVTKNENTNLRIKALLAEMLNDNSVENVRPYSPTQQDILKIYEDSVLNAAIEIPEDIEKISKQAQPTSSELQRYKLWLEQKYRSPYTGEIIPLNKLFTPAYEIEHIIPQQRYYDDSFSNKVICESAVNKLKDNQTGLQFIQNHHGEIVQLGMGKTTKIFTEEAYTDFVKQHYEKSRGKKNKLLALDIPEKMIERQMNDTRYISKFIMQVLSNIVRADKDDDGANSKNILASNGQITTKLKKDWGMDAIWNELVLPRFERLNQITNTTHFTVYNEKYQKYLPVVPLELQRGFQKKRIDHRHHAMDALVIACATRSHINFLNNQNALDKNKSIEQKQHGRYDLRKTLCDKKYNDGSSEKYQWIFKQPWAYFVPEVKSKLEQVVISIKQNLRIINKTVNQHDIIKDGKKDKLKQQKGQSWAIRKPLHKDTVSGLVSLRKTKTVSLSAAFESPENIIDKPLRKYIQKLIAKGFDKKKLAKHFKDNNNQLNEQDVSKVGIYYLENDNVASRVSLDITFNKARIESITDTGIQKILLKQIEKNKDNPEIAFSPEGIEEMNKNIVVLNNGKSHQPILKVRTYETKGNKFAVGQSGNKKTKFVEAAKGTNLFFAVYQDEKGKRSFETVPLNIVLERQKQGLLSAPEQNEKGHKLLFHLSPNDLVYVPYEDELENPQNLNLQKSEQLGRLYRFVSCTGSEGHFVLNNYSVGIINNEHGTNNKSERMLDFKNMPAFFDEKGKPQMIKILCWKIVVDRIGNIKSVLR

SEQ ID NO: 23776 - protein, 1513 aa, unidentified
  REGION 1..1513: note = Cas Enzyme sequence
MKKILGLDLGTNSIGWALVNEADVDKKEILGIGSRIIPMSQDILGKFDSGNSISQTADRTGFRGVRRLRERQLLRRERLHRVLHILGFLPVHYEKYIDFDNHVGKFLSDLEPKLVWKEDENGNFDFIFKSSFNEMVAEFKIIQPQLFERGKLVPYDWTIYYLRKKALSKKIEKEELAWLLLNFNQKRGYYQLRGEEEEDNPNKSVKYHSLKVVEVTADELQKGKTDVWYNVILENGWIYRRTNKTPLFDWKDKIKDFIVTTDLNNDGTVKVDKDGKEKRSLRSPSEDDWNLLKKKTESEIEKSNKTVGSYIFDALLQNPGQKINGKLVRTIERRYYKQELKAILEKQKEFHLELNNKELYKACLEELYGSNEAHRNSNANRDFTYLFLNDIIFYQRPLKSKKSLISNCSYEARIFIDKESGEKKSSPIKCIAKSHPLFQEFRLWQFIQNLKIYEREKVVDEKLQTDIDVTFDFLKTKEDYVTLFEWLNERKEIKQDSLLTSFFKIKKKKGDEKLTHRWNYVEDKEYPGNETRAQFINRLSKVNNVPENFLNAETEYALWHLLYSVEDKSEIEKALKTFALKNELGDDFVEIFSKFPPFKKEYGAYSEKAIKKLLPLMRMGKYWDESSITFDTKNRIESIKVRLQSINYDETLIDTISDDSIPKQVLKSFVSCSNPYSGINTYQACYAVYGRHSESGDIKKWKTPEELEKFIKEFKQHSLRNPIVEQVITETLRVVKDIWNQYGDFTEIHIELGREMKNPADKRAKMTAQISENENSNLRIKYLLAELINHSEVENVRPYSPSQQEILRIYEDGVLNSGIDIPEDIAKIVKTIQPTKSDLTRYKLWLEQKYRSPYTGEMIPLGKLFTSAYEIEHVIPQSRYFDDSLSNKVICEAEVNKEKDNALGYEFIKNNQGRIIELSYGKKVKIFSVSQYEEFVKQYYGKSRGKMKKLLMEDIPEGFVQRQLNDTRYISKVVKGLLSNIVREEGEQDVTSKNVISCTGGITTILKQDWGLNDVWNSIVGPRFERMNELTKSNNFGQWTNKEGSRVYQTEMPLELQKGFNKKRIDHRHHAMDALVIACATRSHINYLNNESAKDSAAKSRLDLKYKLCYKSKTDNKGNYKWMFYKPWDTFTQDAKTAFENIVVSFKQNLRVINKTVNKYQCYEDGKKIVKTQEKGDSWAIRKSLHKDTVAGVVNLKLKKIVNLSIAIDQWEMLVDKNLKTKIKQFINEGFDKKKILKFFAGQEYVWMDKEISKVELYYFTNDKDLQVASRVNLEVSFNSKKIESITDTGIQQILFHHLANYSENTDGKSIEHPELAFSPEGIETMNKNIIELNNGKQHQPILKVRTYEPMGNKFNVGTTGNKINKYVEAAKGTNLFFAIYADDEGKRSYETIQLNIVIERLKQGLNEVPETNEKGDKLVFHLSPNDLVYVLSEEEILSGFNRDSIVNSDRIYKMVSCTERECHFVPCHVATPILKTIELGSNNKSERTWSGQMIKQSCIKLKVDRLGNISIE

SEQ ID NO: 23777 - protein, 1532 aa, unidentified
  REGION 1..1532: note = Cas Enzyme sequence
MKKILGLDLGTNSIGWALVNEAENENEKSSIIKLGVRVNPLTVDELTNFEKGKSITTNADRTLKRSMRRNLQRYKLRKENLIEILKQNKFIANDTILSENGNKTTFETYRLRAKAVNEAVTLEQFARILIMINGKRGYKSSRKAKSQDEGQLIDGMEIAKKLYNENITPGQLVYQILKAGKKYIPDFYRSDLQNELDKIWEFQKQFEPEILTDDFKKQIAGKGKMNTTKIFLARFGIYTADNKGADKRLQAYQWRVAGLTKQLTKEELAFVISDVNGTISGSSGYLGSISDRSKELFFNKQTVGQYLMVQLEQNPHTRLKNQVFYRQDYLDEFNAIWETQAKFHKELTNELKSEIRDVIIFYQRRLKSQKGLVKFCEFEYKIAEFKKDILQIKKCQLINFKNKTIAVLNQQGNRIKIEEILVEKFFNDFSIDGKLITKEFKQRLKIDDNEKLFYQQGQHVIPKSSPLFQEFKIWQQLNNIEVYPVNEKNRKKKPNARILEKEEKAILYSELSIKDRLPKEAILTMLDLQDMDMNFNSIDGNKTRYEFLKAYKEIIELSGHEIDEDNIIDSIKAIFKGFGIKTDVLDFDSEMPLEEQSFFRLWHLLYSFEGDNSDTGNKNLINRITELYSFEKEFARILANVTFQNDYANLSSKAIGKILPHLKDGEHYDVACVLAGYGKHSASSLTREELDNKVYKNTLDILPKNSLRNPVVEKILNQMINVINCVIDTYGEKNVEGEIIKKPFDEIRIELARELKKNADERFLLTGGIDENTKGTERIKKILQEEFGISTPSRNDIIRYKLWQELAPIGYKPLYSSKENRNREISPSILFTKEVEIEHILPKARLFDDSQSNKTLAFHSDNQNKGDKTAIDYIIEVDGENGLEEYLNRIIIVCGKKMIKKVIKNQKGEKSIKSEEKTFDLYRKEYEKTLKKKEAKDKWNNMSEIERRLAIINKYYSGKLKKLIITGKDIPDGFINRDLGNTQYISKYAKTMLGDLVKFVISTTGSITDRLREDWQLIDVMPELNWEKYDKLDMTETIENRDGQKIRRIKDWSKRNDHRHHAMDALTVAFTKRSFVQYLNNLNARRTSEEQGISNSDKSEKEQSSITTEDIILTTYDVMGIEKKELYRDKNNKLRFNPPMPLGDFRAEAKKHLENTLISIKAKNKVTTININTTKKKNGVNKKEQLTPRGQLHQETVYGKINWSRIKLTDKISKIELQAIKDQQLKQFIEDQIKKHGSIKNAFSKENLTTLRFKDKLITELTINIPCYTQKIDIQKYFTDNKKSISARESAIESIIDIRVRKILYDRYFENQKDFKKAFSNLAENPIWLNKEKGIAIKRVTITGISNAVALHDKKDKEGKLILDKEGKTQPVDFVNTGNNHHVAIYKDENGNLQENVIPFFVATERVSQGLPIIDKSYKNEDGWEFLFSMKQNEYFVFPNEKNGFNPSEIDLSNPDNYQVISPNLFRVQKLSTKNYVFNHHLETTAITGETLKNKKQLSTVTYHFIQSLPPIKEIVKVRINHIGQIVSVGEY

SEQ ID NO: 23778 - protein, 1518 aa, unidentified
  REGION 1..1518: note = Cas Enzyme sequence
MKKILGLDLGTNSIGWALINQDINNQQGEILGAGTRILPMSQDILGKFDSGVSISQTAERTSFRGIRRLRERHLLRRERLHRVLNVLGFLPEHYANQIDFAKKLGQFISETEPKIAYSYNSQARKFDFFFKTSFEEMLNDFKQHQPQLLSNKKGQPALIPYDWTIYYLRKKALTHKIEKEELAWLLLNFNQKRGYYQLRGEEEEENNNKLVEFYSLLVTGVEDSGDRKNKDEIWYNIHLENGWIYRRTSKTPLDWVGKTKEFIVTTDLNDDGTVKKDKEGKEKRSFRAPAENDWTLVKKKTEYDINTSNKAVGAYIYDTLLQNPNQKIKGKLVRVIERKFYIQELKQILETQQIFHDELKDVNLYRACIEELYENNESHRNNISERDFVHLFLNDIIFYQRPLKSKKSLISNCKFESRTYIKNGKKETEPLKCIAKSHPLFQEFRLWQFIQNLKIYQREKHVNEVLLTDVNVIEDCLTNEEAITDLYDWLNDRKEVDQKALLKYFKIKNVNDYRWNYVEDKLYPCNETRAQITNRLSKVPNMPSDFLSRENEEALWHILYSVEDKEDIQKALKSFATKHQLDEQFVIQFSKFPPFKKEYGSYSAKAIKKLLPLMRKGKYWSAENIGQQTQDRISKLINGEFDETIRDRVREKALHLNNLEDFKGLPHWLVSYIVYDRHSEDGDNKQWKTANEITLLEQHSLRNPIVEQVINETLRVVQDIWKNYGNEDEKFFDEIHIELGREMKAPKSDRERMTRQISENENTNLRIKALLIELLNDKDIENVRPFSPMQQEILKIYEEGVLSAEDGNIPDEILKIAKMAQPTSSELIRYKLWLQQKYRSPYTGNIIPLNKLFTREYDIEHIIPQSRYFDDSLSNKVICEVEVNKDKDNATAYEYIKNNRGKKIELSHGKIATLFTVEEFEEFVKTHYNKSRGKMKKLLMDNIPETFIQRQLNDTRYISKVVKCLMSNIVREDNEQEAISKNVLTSNGAITSTLKQDWGLNDVWNEIITPRFERLNELTKSQNFGEWVNKDGKKVFQTQVPIELQKGFSKKRIDHRHHALDAIVIACASRNHINYLNNESALGSEKKEIKEKKRYDLKHKLCFKKYNDDSKTNYKWVFDKPWDTFTQETKESINSIIVSFKQNLRVINKTINQYQSWVQDENGNLVKRLIKQTKGENWAIRKPMHTPMPYSKKSYDFDVLKISENIGKYELIIDEEIKNKVINILIENKNRVTDTQKFLKNNPIINENGKAVLVTGFKLKNEKFRKRQHISKLGNRGLGGIKTLEDAHKFISKVADYKLQQDLIKHLQENNNDIDKAFNPDGIDQFNSARKIPVYKLPIAEKGDKRFALGEKIGNKHKWMEAAEGTNLFFAIYQNEAGKRSYETIPLNVVIERQKQKLSPVPETNEYNHKLLTYLSPNDLVYIPTAEEKENSGTIDFSNLDNEQIKRVYKMVSSSGTQCFFVRHDIATSIVSKFEFSALNKMEKSIDGIMIKEDCIKLSIDRLGKISIFNKARIVDFA

SEQ ID NO: 23779 - protein, 1279 aa, unidentified
  REGION 1..1279: note = Cas Enzyme sequence
MKKILGLDLGVSSIGWALIDEEENKILGMGSRIIPLTTDDKDEFTKGNAISKNQKRTTKRNQRKGYDRYQLRRQNLTFILKQNNMLPDVGLIKLHKLDLWKLRSDAVEKKLSIEEIGRVLLHLNQKRGYKSSRSEANLDKKDTEYVATVKSRYEKLKEQKKTIGQKFYEELLNNEYYRIKEQVYPREAYIEEFNTILKKQQKYYPEILTDDLISKIRDEIIYYQRKLKSQKGLVSVCEFEGFWSTIKINGGEKELFIGPKVAPKSSPLFQVDKIWEMINSISLKNKIGEQIEIPLEKKNKLFEYMDSHEKLSYAELLKVLELKKDDVYGNKQLANGLPGNKVKVEMMKCFDDLAHYENLFNLEIEIEEKNEEGYLIDKESGEIVNSKQRKIVLPRIEQQPLYKLWHTVYSISDKEECKNALIKNFNLSENAALKLSSLDFTKQGFGNKSHRAIRKILPFLMEGDVYSDACSYAGYNHSNSLTKQENYERKLLDKLKPIEKNSLRQPVVEKILNQMVNIVNTIIDKYGKPEEIRIELARELKQSKEERNNIYNIINANKTINKEISNRLTELGIATTRKNIEKYKFIFPIRTVINKDGKVDSPKLKNAVVFNQCIYCGQSFSLGEALLGNEFDVDHIIPQSLLFDDSNLNKVLVHRRCNSSKLDKTAFDFIRSKGNDQLNEYLDRLHVWYQKGILTYGKLERLKVSHEDYLERKRKKKTNKGDINLWESFIDRQLRQTQYISRKAREILQSICYNVWATSGSITSELRHIWGWDEVLMNLQLPKYRELGLTETIEITNDGNTDKKEIIRNWSKRDDHRHHAIDSLTIACTKQGFIQRFNRLNSGKVRNDIMKEIDSVKYNFDKRKNLLENYILSVRPFTTKEVEKEAEKILVSFKPGKKVASIGKRKIKKGGKKIVAQIGIIIPRGSLSEESVYGKIKTIEKEKPVKYLFENPELIFKPYIKNLVEERLGLFNNDVKKAVASLKKEPIYLNKDKTKILEYGTCYKEEVVIKYPLGAGQGMLFDGKESEEKALKVLSFVIDDAIKEKLKNKLYDKDGNYLKTRDAFKDLENNPVWYNEELKIPIKTVRCLTGLSAVEPVKKDENGKEIGFVKPGNNHHLAIYIDEQGNKQLSICSFWHAVERKKYGIPIIIKNPIEVIDKILLDEDKYSEGFLEKLPDSKWIYLESFQQNEMFVIGMNEEMYEEASSNNDYKAISNYLYRVQKIFYNGEQMEIFFRHHLETQLNDDNNSKLSKRFYQIRGLSKLESLNPHKIKLNHLGEII

SEQ ID NO: 23780 - protein, 1424 aa, unidentified
  REGION 1..1424: note = Cas Enzyme sequence
MKRILGLDLGTNSIGWAVVDEAENIDEKSSIVKLGVRVNPLTVDELQNFEKGKSIETNTARTLKRSMRRNLQRYKLRREELIRILRDAGFITDGTILSENGNRTTFETYRLRSKAVTDEISLEEFARVLLMINKKRGYKSSRKAKGEEDGVLIDGMEVAKKLYEENLTPGNLCLQLLMNGKKHFPDFYRSDLQNELDKIWDFQKQFYPQALLDEAKEEIRGKNKTQTWAILQKYFIWNEIVTTWDEDANQTVKVEKQRKLTGLKRSTKGIEQKMEDYQWRVKALSEQLGMEELAVVLQNINGEVNSSSGYLGAISDRSKSLYFNKQTVGQALMDSLAKNPCKSLKNTVYYRQDYLDEFEAVWEKQAEYHKELTPELKAEIRDVVIFYQRRLKSQKGLISICELENREKTIVKNGKDKTITIGLRVIPRSSPLFQEFKIWQTLNDIEVSVADKQMKRRKKKEEVPSLFGESDEFELTGKRALTQEEKELLAKELFIRERLNKSEVLKLLFENPQELDMNFKQIDGNKTGYQLFQAYSKVLEMSGHEPIDFKKSVDEIMEQTESVFSSLGWNTRVLSFDSSKPLDEQDYYKLWHLLYSFEGDNTVTGDGNLKQKIAKLCGFDLEYTQAISSVTFVDDYGSLSAKAIRKILPFMKEGNKYSVACTYAGYQHSASSLTKEEIENKQLKERLELLPKNSLRNPVVEKILNQMVNVINEIITTYGKPDEIRVELARELKKNQKEREELTRSIAVATKETEAIRKILQTEFGMAHVSRNDILRYRLYEELKDNGYKTLYSDTYIPREKIFSKELDIEHIIPKARLFDDSFSNKTLEVRSVNIEKGNKTAYDFVAEKYGEEALQAYLNRCEALFKGKKTKLRKLKMSESEIPSDFIDRDLRNTQYITKKALAMLNEICRRVVATTGSVTDKLREDWQLVDVMKELNWDKYAAIGAIEYFEDKDGRRIGRIKDWTKRNDHRHHAMDALTVAFTKDVFIQYFNNKNASDKPNSNEFAIKNKYFNEGKAIAPIPLSEFRAEVRKQMENILVSIKAKNKVVTSNINSSKRKGGVNQRVQQTPRGQLHLETVYGGHKEYVTKEEKVNASFDEAKIMTVCKRIYKDALLKRLKDNGDDPKKAFTGKNSLEKNPIWLNEEKSRAVPVKVKTVTMETVYTVRKPVDANLNIEKVVDAKIRRLLEERVAKYGNAKLAFANLEDDPIWLNQEKGIQLKRVTIYGISNAQAIHEKRDKDGNYVLDDRGNHIPVDFVNTGNNHHVAIYRKPVLDKQGLPTYDEQGNPLYELDEKVVSFYEAVARVNEGLSIIDKTYKQEEGWQFLFTMKQNEYFVFPNEKTGFNPKEIDLMNPDNYALISPNLFRVQAITSKDYMFRNHLETMVEKKNELQNITWKRLKSLPFLNKVVKVRVNHIGQIVSVGEY

SEQ ID NO: 23781 - protein, 1072 aa, unidentified
  REGION 1..1072: note = Cas Enzyme sequence
MYKSSLGVHLDVGHDSIGWCVTRFSPNDERFLAIPGAGVVLFPADDCLANARRAFRRQRRHIRATRQRISRMKAMILGLDVMTSKELDANPTAAPWKLAAQVLSCNRTLTWGELWCVLRWYAHNRGYDGNALASAKNRIDADDEDIKNNAASKEMMRRYGTDSMAETMCRFLGVDPCGKQISSREYFKGNKVSFDRKLVVKEVARILQFHKDRLPGITDEFIHMLVADPLENRNFLHLQSGLPFRIQNRYWGGVLFGQLAPRFDNRIIGVCPVSGKKLPSKTVSEFFEYRWAMMLANVVVGNAGRSLSVEEIGRLNEDVLRAGGYSKAEFKKLVVSVTGETVNNLDALLATPEADASLVRFPGVHALSKKGLREVLDDRDFRKFANILFKGKRLTLKDIAHNVSGSKKEAILALANLQCEKGRPKKKGAAKKSIDDIMSDAIAADLPSGRSPYSRDVMHEAAKSVFDGRDPRKSGGLLYRDCTKADILKASDIDKETNNHLIRHRVKILLRLLKDIVRDYAENNPAQVAQVTIEMARDLKDLSGMTNKQIVSEMLDKTRQHQKAAKMLAKHLKIDERLVSPGLIRKVRIAEDMNWTCPYTGAHYDIQDIVSKSDREPGCVDKDHILPRSERTTDSLDSLVLTYTEVNRMKEARTGLAFVRECAGMRVPGKENLVIVNEAEYKKTVEGLKLSGHADDRKRQKRRKLNLLRLRSDEAGMTEGMLTRTSHITALATKAIRGYFENCGRMPEIVTIPGRVTAVLRNKWNLLGILAETDGRVKDESGRLRLKQEIREITHMHHAVDAITLGLAATLLPRDGTFWAVMCKRRVKESEKAMLQSTGVFRFSVGNEPQLVELPEYLRSAIKAALDEKRVVVHQPQERSGLKVKQNIWGIEAVESGFVSIRQRARDENTGRISVKRDCIPVGKAFGLNPSGVSGKLKAIKGVLLPDGNYGVALVKDNPVVIRHQRVWGALADLKEKNGGRMPEILRRNDLIKVETGGYAGIWRVASVKDNKDGLALDIIVPFAVKPKSGVSFAKINVNLKTLMVNRLKVLKTCYTGVSICPITSLTSQRTM

SEQ ID NO: 23782 - protein, 1397 aa, unidentified
  REGION 1..1397: note = Cas Enzyme sequence
MKRILGLDLGTTSIGWALIEEAEKRENSKIIKLGVRVNPLTVDEKINFEGGKPISTNADRTLKRGARRNLDRFQLRRDNLIEILKEHNFINDDTALTEIGKNTTYETLFIRAKAAREKITLEDLSKVLLAINKKRGYKSSRKTKEESDGVAVDGMAVAKILYEYELTPGEYTFSLLKNKKKHIPDFYPSDLKAEFLAIWENQKNYYPELLTQALFLELKDKKSGQTWTICSKPFEIEGKYLKGSNDEQRLLKYQFRNDGLKEQLDLEQLAIALQEINNDIDGTSGYLGKISDRSKILITDKITVGEFMYDQIKKDPHTSLKNQVFYRQDYLDEFELIWNTQAAFHKQLSDELKSEIRDVVIFYQRPLKSQKGLLSHCIFESWEQEYYDQIKEKTRKRTVGHRVIPKSSPLFQQFKIWQNINDLEFKYIGKNIDELKKEDLIIDKKLVTLKIDQEDRELLFNEANSKANSKGKISTTEVLKLLGLSSKDWKCNFEEGINANTTNQKLLDVYQTIANREGYGHDWSKKTGSEIWEELQVVFNDIGIDNGILGFDPLIEGNEYSSQKSLELWHLLYAAGDGGKVQEEDQLIYGNQDVALRKKLHLKYGFKPEYAKMLSNISFPNDYGSLSSRAIRKIMPHLIEGHDYYEACDLAGYNHSNSLNKEENDNRELADHLDLISKNSLRNPVVEKILNQVVNLVNQVIDTYGKPDEIRIELARELKKSTEERKKMTQYINTATKLNLDIAKTIQKDFGFTPTKSDVVKYKLWEELSTRGYKSLFSDTYIAKEDLFSKKIDIEHIIPKALVYDDSFSNKTLAYREVNLKKANRTAMDFISQDKSKDIEVYKERVEALYDKGKGAITKAKRDKLLKAAGDINEGFIERDLRNSQYIAKKSRTLLEKVCKTVTPTTGMITDKLREEWGIINVLKELNLDKYKALGLVEVEQRKHGKEVEKIKDWTKRNDHRHHAMDALAVAFTTVSHIQYINNLNARRNTLHEKHKLILGIENKITEMVLNKNGKNKRVYIKPFPNFRSHAKKNLEEILISFKAKNKVVTKNINKTKKEGGYNRTKSLTPRGQLHKETIYGKSLTPEVKTTKLNKRFAFAKAEHVIDQKQKIIVLEYLKKYKDDPELAFDGKTLKKDPLLWHDKPLTEVLCYKEIYTIRKDVSPDLKIDKVIDNGTKEILRKRLSEYGNNAKEAFSNLENNPIWQNKERGIAIKKVTITGVANAVPLHTAKDHLGTDLIDENNNKIPVDYVSLGNNHHVAIYKDPKDKLQEKVVSLYEAVTRSNQDLPIIDKTYNQELGWEFLFTMKQNEMFVFPSEEFDPKEIDLMDEKNRKLISPHLFRVQKIANKNYMFRHHLESTINHDLDFTYKHLRSLGLMEELVKVRFNHIGQIVHVGEY

SEQ ID NO: 23783 - protein, 1370 aa, unidentified
  REGION 1..1370: note = Cas Enzyme sequence
MKKILGLDLGTTSIGWAFVKEAENENEKSSIVNTGVRVVPISTDEENDFKKGNSITINADRTLKRGARRNKFRYQLRRKALIDELKLINFINEKTKLTETGKNSSHELLSLRNNAVSEKLKKDEFARVFLSINKKRGYKSSRKANNSEEGELIDSMDITKKLYDHDLTPGEFSFTLLKDGKKSLPDYYRSDLENEFNKVWNHQKKYYPEALTAELFKEVEGKNKNQTWKICEKPFSIKGIKIDGSKADKKLETYKLRKLALSEKIGLEYLAIVLQDINSEINKSSGYLSEISDRSKELHFNNMTVGEYQYKQIAKNPHNSLKNQVFYRQDYLNEFQKIWEKQAEFYPELTNELRDKIQNEIIFYQRRLKSQKGLISYCEFESWEQEVIIDGEKKNKIVGHRVVPKSSPLFQEFKVWQNLNSVRITNVKTNEVYHIEEETNKELFQTLNWIDKLTDKQFLKELGLKPNEWKINFKTVEGNRTNYNLLKTYKEILRIEGYDNIDYSKIDAEDLIEILKKCFDEIGIDKGILEFTSTLKGNPFSKQESYELWHLLYSYEDDFTRTGTESLEQKLKSTFGFKDEHLHSLINISFQDDYGSLSARAIRKILPYLEDGKLYSEACELAGYNHSNSITKKQNEERELKPKLEILKKNSLRNPVVEKILNQCINVVNAIIEDSEMGRPDEIRIELARELKNTKEQRSEMTKAIGRATKDHEKYRDEIKSKFGLPHVSRNDLIRYKLYKELETNGYRTLYTDEYIKPEDLFSKKYDIEHIIPKSRLFDDSFSNKTLETRKSNLDKGDETALDFVGRKYGKEGLEKYRKRVEELFKAGKIKYSKQNKLLMSLNDIPEDFLNRDLGTSAYIAKKAAEILLDITRRVSLTSGKITSKLREDWGLIQVMQELNWDKYEKVGLTYYKENKEGKKLPRIKDWSKRNDHRHHAMDAITVAFTKPGIIQYLNNLNAKSNKEIYKLENTYTYKDEKGKRKFIAPFPTIRKESKEQLSQILISFKTKNKVTTKNKNKINVEGNNKFKYQTVETPRGQLHKETIYGKSQYYETKLEKVGSKFNQEMIGLVASKTYRKALLKRLGEFENNSKIAFTGSNSLTKNPIYINGTQETVPDKVKMAWLEGRYTIRKEVTPDLKLDKVIDDGIKAILKKRLKEFNDKPNDAFANLDKNPIWLNKEKGIKIKRVKITGVSNAEPLHHAKNHINQELKDKHGDSVPTDYVSTGNNHHVAIYKDDKGNLQEEVVSFYEAVTRKNIGLPIINKHHEKGWEFLFTMKQNEMFVFPNEENSFNPNEIDLLASSHQSRISGNLFRMQKFTNRDYFFRHHLETNVDNIKETHHLSWLRTGLSGVGQIKKVRLNHLGKVVQIGEY

SEQ ID NO: 23784 - protein, 1346 aa, unidentified
  REGION 1..1346: note = Cas Enzyme sequence
MKKILGLDLGTTSIGWAFIHESESDSEQTEIIGAGVRLVPLSKDEIAEFSAGQQISTNANRTLARSARRGLQRYKLRRAALLNVFLQNGWIKPENHYAEVGTLSTHSTISLRAKAATEKIEFTDLLKVLISINKKRGYKSSRKDKFLAENGVAIDAMVIAKELMTKKQTPGQWVHKYFAEAGFAKVPDFYPSDLKNEMKLIIESQNSFHPDVINENLIEKLSDKTSKTAATFFTKELNIELSEHLGLRSDRIKNLYLLRSRALSEELPLGDIALILSEICGQISGSSGYLAAISDRSKQLVVKNQTVGQYMWELLSSNPHDRTKGLIFYRQDYYDEFETIWNCQSQFHPELTQPLKEEIRDVIIFYQRKLRSQKHLISNCELEENRKCIPKSSPLFQSFRIWQNINNLEITDSSTGEKAMLDEEAKNHLFSFLNQRDKLKGEEAKKVLGLSKHHELNFKEIQGNRTRAAIIDSFLKICDLEGHSLERDLKSAVAFEESLSQMLLHFNMPADLLSFNLTDTKVYNDLEKGWFHQLWHIIYSAEEDQFVKKWFQEKLSFSESWAKAFLATPLETDFASLSAKAIKKILPFMTDGTRYDEACVLGGYNHSKSLSKEENANRILVDRLTEIKKNSLRNPVVEKILNQMVNVVNAIADSEKYGKPDEIRIELARELKSNVAQRKTMSSSIADNTKKNEQIKNTIRKEFGDGYVTRNNVLRFKLWEECGKISIYTGKPIQGSELFDSVYDIDHIIPQSRLFDDSMSNKVLCERSLNIAKGNKTAYSFLLEKYGEESTEFQQFLSRVKDLKFRGLIKFSKSQKLMTTDEKIPNDFVDRQLRETQYIAKKAKDLLNTFARNVVSTSGEITDKLRKDWGIEELLKELNLERYSSRPDLISKSTNAQGRVITRIENWSKRDDHRHHAMDAITIALTKRAYIQYLNTLSAKTDKNSITYALENKYLVRDTDGKLKFISPIKDIRSAYKQTLQKILISHKVQAKVTTKNANRIKTKNGVISVTRNQGSVRGQLHLETVYSQFQRYETSFIKIGASTTLEQINSISNQRYRNAIKKRFDEFGKDSKLAFGGKNAIAKNPIYLDEREQFKIPEKLKITNIVEDYSIRKPIAPGLKLDKIIDEGIKKILQKRLAEFGGDDKKAFVNLDQNPIWMNKEAGIFIKSVKIKGISNAISLHEKRDHFGNTIINKGKAEPTSWVNTGNNHHVAIYKDENDKLSEDVVSLLEAVTRKNLGLPIILEEHPEKGNLVLSLKSNEMFLFPSETFDPFAIDINDPNNYSLIAEHLYRVQKFSSFYYVFRHQYETKISNDKDIKDITFKRINSMEPIRRIRKIRINHIGEIV

SEQ ID NO: 23785 - protein, 927 aa, unidentified
  REGION 1..927: note = Cas Enzyme sequence
MRLGKYWNEESIESTTRDRIQSIIERLGTINFDTKKIDDITDDDIPKQVLKSFIANRENPFSGLNTYQACYAVYNRHSEASEITKWKTPKDIEKYLEEFNQHSLRNPIVEQVVTETLRVVKDIWELYGEGREDFFSEIHIELGREMKNPAEKRKQLTQRNSENENTNQRIKALLQELKNDINVKSEVKPYSPSQQEILKIYEEGVFQNSPEEYKFIKLEEVEKIRSNNSPSRSEISRYKLWLEQGYISPYTGKPIPLSKLFSTEYQIEHIIPQSRYFDNSLNNKIICESEINELKDNKTAFAFITEEKGRIVELIENKTVKLFTVEEYEIHCNNYFKKNRSKLKNLLSEDIPEGFINRQLNDSRYISKLIKGLLSNIVREENEEEATSKHIVPVTGAITSQLKKDWGLNDKWNEIVAPRFIRLNEMTNSRDFGFWDKTINAFRTQVPDEIARGFNKKRIDHRHHALDALVIACTTKDHISYITSLNTQRKNYGLIDKLRVRKEIQIKNKYTGETIIKKVASDYHKPWPNFTINAKEALEQTLISFKQNTRVITKANNKTWQWVHKNGILKKELVAQTKGDNRAIRKSLHEATVYGKVIIKREKGIVSIAKALENWEMIVDSTIKEIVKEKVKFYKTDTKLLKKYFKDTPIIINGKKIEKIRVFEKVMASASRFALTNKLTRKQLERITDSGIQMILENHLKNYIDKKGKEHLELAFDPDGIDELNKNIVALNNGKFHHPIYKVRLYEVGKKFAVGYTGNKKDKYVETAQGTNLFFAIYQDPESKKRSYETIPLNVAIERKKQGLNVAPERDENNNILLFTLSPNDLVYVPNEEEQEQPDLLNIKNLTKEQVERVFKIVSSTGNRLHSIPNNISKPIFNKNEFSILNKLEFDLQGNSIKENCWKLKVDRLGNIKQVANSLNIQSNAIV

SEQ ID NO: 23786 - protein, 1416 aa, unidentified
  REGION 1..1416: note = Cas Enzyme sequence
MSRKIIGIDLGTGSLGLSLRNPELGENIQDQLEYFSVTTFNSGTGASQTGEYTLASNRRLHRQSRRLKEHSRWKRWNTLALLIEYEMCPLRKESLDRWRVYDRVRGLKREFPIDDEPFVQWLRMDFDGDGVSDCTAFQLRRDLVEKQFDFTTPIDRYKFGRAIYHIAQHRGFKSSKGETLSSQEDNKKDSSTIDADNLENEMQKSEAKKSKDILEYKNSHGFRTVGQAFAALEEEGVRIRNSRFQAVRKDNIDEINEYFSFQKGLAASKYEELHRRLVGTTKREKATLFYKLPLRSQKGNIGKCTFEKNKRRCPISHPEYEKYRAWGFINSIRFRGNIEEGWQELPIELKRKLYQKEFVAYVRKDFTFDKIRIFLERQLGMSFKNAEGEKTINYKDNTLVSGCPVTARLNNIATIFDTEITRLTVHGSKTRLSHSKKDGKKHIVVYNAEDLWHVCFEADEIEDVKRFSQHSLGWDDKATDALCKLWASIEQGYAPLSKKALKNTNRFLEYGLKTSDAIFLAKIPDITGEMDVEKIIKFFYENVRTPVEASQRIARVANSLISNYKSLSLDERFAEHNFEYQLQGEDKKEILSCLHSNVSSFESMDVTEKQSMIAEVTRLYQDFFANPKREYVKVPRTADVLLAELRILYPDIKDKKWERLYHPSMVSDFTRKKEDEGLLGSPNIGSIRNPTVLRALNVLRKTINKMIVEGLVDPKETRLVVETTRVNNDINKRWTIKKYNDERRDENIAIKKILKEYYPEKDINDEDIDAARYVLEQGGEDIFTNDKPNDLHYRHQIKKYKLWLEQGCCCLYTGRIINLSNLLSENYCDIEHTIPRSLSFDSSDKNLTVCDSYYNRHIKQNRIPIQLPNYNCDVTIDGTTYTAIKPRLEKWVQQVEKLSKNVLFWKNRARRAQTEDSKNACIRQKLLWQMEYDYWRQKLDRFKMKPENLTDGFRNSQLVDTGIITRYAVLYLKTIFNSVDVQNGQSTAAFRKVFGIPIKDRSSNSHHAVDASILTMIPVAAKRDRILKLFYQIDEYRRNGYDTIGLDYQLRKEVSSCGLGSGLAGIEDFISQRVMVDFYKQDRTLQKNVKPVIRKGKPLMQKTESGKLASVTFCSDSIRGELHKQTFYGAIKQRGEEKLVFVVREPLKYKTSNNDNGFKDWKELNDRLVDLNDDNKGDGIKPLVKMMMDQFPEGTSFKDACEQGIYMLDKNGRKVNQIRHIRCYAKNVTNPIKVKRHTCLSDKEYKQYVWAALGEGGIYALCEYVNENNKVYKRYTYMDISENRKHREEDIPSTITDKKGLILTLRRKICKGDMLLIYKDSPDELLLMDSAELSKRLYKVQSFERKNDIVLRHHLLSSAETNEDAEVKKKKRDKGESIKDFAKLPDIIRSSIASFHYLQKDVDFEFGKNGLRLMTI

SEQ ID NO: 23787 - protein, 1426 aa, unidentified
  REGION 1..1426: note = Cas Enzyme sequence
MTKILAFDPGTNSLGMVCRDTMNDNLMEQITSGVDIIRDNTERDKRGRHSSAASQRRSFRNARTRYRSVKRRKQATLKLLIKHNCCPLDIESLNKWRFDDDEKGYDRTFPVHNEEFMKWINFKFIIDGEEVKSVYRLREILVTKPLDFSRPESWLMLGRAIYSIAVRRGFKSSRLANSEINDEEDEEGVDLQKSEEELFSGLKQYMKEHNCKTVGAAFARMERVDKIRIRANNDYKPIRSKLKEEIEEIFKVQKRDTNSELYKGLMSEKKHEGTIFYKNPLKSQKGKVEYCTLEPRRRRCPKSHPANEFNTAWQLLNNIKIKRNGLWENITLDIRHKIFNELFVSNEKHFDFVKIREMLQNEYQIQLEYKESINYSDNKSIHGCPIIYYLQKILGPSWETERISGTNKHLKHAQRRKKLFNKEDKRSIEEYTEAEGHLTEYTYEDIWHICYESDEKQFVKDFAKNVLCLSPSKVISMGALWEAIQDGYAKLSLCALKKINPFLAKGYKYSEAVMLANLPTIMGDTFFQQNEQEIIGLMDKERAAILSKNRIYDITNKLISDYKSLKLEGLAFAERADHDYILQDDDIEDVKKACAENFGKEWDALTDNQQSAIITHVKELYQKFFFSKERDYCKRINLADAVKAALAEKYPFLTKKKLKKLYHHSDNSYYPAAHTNENGILQLGNPARGNLKNPTVLKVLYKIKENVNKLLISGDIDADTIIVIENAREGLNDFNMRWAIEEYGKKREKENKAIEDALTDLAKEFHLTLPKGCVSVARLALYQNRDFTPYNPNEPRRLYDKLCENYKLWLRQGFFDFYTGHPITLAQLFSPDNLVEVDHILPVSKSFDNSISNKVLSSTRYNRTIKGTKLPCELPNYDIDTAEGTAIIHRIQDIERKVKYLENKVTYWKGRSSRAANPESKNWAIKQCHLWQMEYDEWNQLLTNLTTREITPSFRHNQLNDTRIISKYAYHYLKSVFGRVVVQRGETTAVFRKIFGFQEVYEKKDRSRHTHHAIDALTLSMIPYGPRRERMMELWYQIQESHRFENYDTERQLKDKLDREVSLCGLGNYSPTEIVKYIEKTTLVRNDATNNALTKNIKRFRVRGKVVPLRDKYGNVIYEKTSKGIKRVKAKYVSQGNSIRGAIHDQSFYGKIEKWKNGKNHEIEEVFVIRKKIEFKSGDKGKGFKSWDDLKAQMVDKKLFDKFEEKGKDFKKACDEGIHICIAENGERRMVRVRRVRCIAKKAQPLKKHIFQPRKDNKERFYYVSSHGEAYGIFEYKSRDGALHYESDNLFTLSEKMKTRNLKETPCPRVIKDKKGKEYFHTRTILKDATILIYPSGESVESQYHLDAATISKRLYRVNTIEMQRKRLTLTRHNLVKSWTETNTISDSDFNTLPEGMRMPITKLNYLLLGTDFEILDGRIVHIKKE

SEQ ID NO: 23788 - protein, 1395 aa, unidentified
  REGION 1..1395: note = Cas Enzyme sequence
MKKILGLDLGTTSIGWALVNEKENDNEKSEIIRLGVRVNPLTVDEKTNFEKGKSITTNADRRMKRSMHRNLQRYKLRRKNLIECLLEHHIISDETLLYEQGNNTTFQTYRARAKAVTEEISLEDFARVLLMINKKRGYKSSRKVKDGEEGELIDGMEIAKRLYEENMTPGQLLLDLYNKGKKNRPTFYRSDLQAEFDKIWNTQSAFYPNILTDDFKSSIHGFNKTQTAGAFYGVHQITTAKNAGKEGYAQALSWRTDALNRQLGIEEVAYILADINGAINNSSKRLAMISDRSKELYFNHQTIGQFLMKRLDENPNNSLTNIIFYRQDYMDEFEVIWEKQAQYHPELTSELKKEIRDIIIFYQRDLKSCKNLVSYCELEHTEREITIGSKKKTILTGCKVCPKSSLLFQDFKIWQILNNLQVSVVGRQRKKIKKDNTQPSLFDDVETSALTRFLTQEEKDILYNELSIKDKMSKKEVLKLLFDNHNSLDLNYKEVEGNRTMAALFKAYQDIISLTGNGEYDFAKMPTDEVMNVTTEIFRGLGYKTDFLTFDPLLEGKSLEQQHAYRLWHLLYSYTGDNSATGNEALLNKIKELCGFEKEYAVILSNIPLALDYGSLSAKAIRKILPHMMKGYEYSEACKMAGYNHSARSLTKEELAKKEYKSCLDEIRRNSLRNPVVEKILNQMINVVNEIVKTYGKPEEIRIEMARELKKSQEERELLDAAIRKNTAESEKLRKELEDEFGIQHVTRNDILRYKLYNELKLNGYKTLYSNTYIPREDLFSKRFDIEHIIPQSRLFDDSFSNKTLEVRDINIEKGNMTAYDYVAGKFDEKYLVDYESRIEELYTQKAISKTKRNNLLMKEENIPSDFLERDLRDSQYIARKAREILEELVPFVVTTTGAVTSRLREDWQLVNLMQELNWDKYDALGLTERYTDKNGNIVKRIKDWTKRNDHRHHAMDALTIAFTKRSIVQYLSNLNARSDKSSSIYGIEQKELHRDEKDHKLVFNAPMPLNEFRAEAKKHLESILVSIKAKNKVVTKNINKSKTKDGHQNKIQLTPRGALHNETVYGKIRNYEAEYRKVDGKFTEDIILRVSSQKHREALLKRLAEFDNDPKKAFTGKNSLEKNPIWLNEDHSHAVPLKVKLYKIVDVFTIKKAVDKDLKLDKVIDDKVRTILQQRLDEFGGDAAKAFSNLDENPIWLNKEKGIAIKRVKIRGIANGEPIRVKRDVMGNIIKDENGNPIPNDFVNTGNNHHVAVFRDASGKLQEHVVSFYEATTRAILGYPIVDKEYNRSEGWEFLFSMKQNEFFVFPNEKTGFNPQETDLMDANNWSAISPNLYRVQKFTTGDYFFRHHLETNVENSNNLKDITWKRINSANNLAGIVKVRLNHLGEIVAIGEY

SEQ ID NO: 23789 - protein, 1398 aa, unidentified
  REGION 1..1398: note = Cas Enzyme sequence
MKKILGLDLGTTSIGWALVNEKENDNEKSEIIRLGVRVNPLTVDEKTNFEKGKSITTNADRRMKRSMHRNLQRYKLRRKNLVECLLAHHIIKDDTPLFELGNNTTFQTYRARAKAVTEEISLEDFARVLLMINKKRGYKSSRKVKDGEEGELIDGMEIAKRLYDENLTPGQLLLDLHNKGKRNRPTFYRSDLQAEFDKIWDFQSTFYPNILTDEFKSSIHGFNKSQTSGAFYGVHQISTARNSGKEGYVQALMWRTEALKRQLGIEEVAYALADLNGAINNSSKRLAMISDRSKELYFNHLTIGQYLMQILNENPNHSLTNIIFYRQDYMDEFEALWEKQAQYHPELTLELKKEIRDIIIFYQRDLKSCKNLVSYCELEHSEREITIDGKTKTILTGCKVCPKSSFLFQDFKIWQMLNNLQVFVVGRQRKKIKKDKTQPSLFDDVETGALNRFLTQEEKDILYNELSIKEKMSKREVLKLLFDNSNSLDLNYKEIEGNRTMATLFKAYQDIISLTGNGEYDFAKMSSKEVLTITTEIFKGLGYKTDYLTFNPLLEGKALEQQPSFRLWHLLYSYTGDKSATGNEALMKKIQELCGFEKEYATILANISFALDYGSLSAKAIRKILPYMMKGYEYSEACSLAGYKHSARSLTKDELVNKEYKSHLDEIRRNSLRNPVVEKILNQMINVINEIIKTYGKPDEIRIEMARELKKSKEERELLDAAIRKNTAESEKLRKELEEEFGIQHVTKNDILRYKLYNELKMNGYKTLYSNTYIPREELFSKRFDIEHIIPQSRLFDDSFSNKTLEVRDINIEKGNKTAYDYVAEKYDEQGIVDYESRVEELFSNNAISRTKRNNLLMKEADIPSDFLNRDLRDSQYIARKAREILEELVPFVVTTTGSVTSRLREDWQLVNIMQELNWDKYDALGLTEHYTDKNGNIVKRIKDWTKRNDHRHHAMDALTIAFTKRGIVQYLSNMNARSDKSGSIYGIEQKELHRNEKDHKLVFNAPMPLDEFRAEAKKHLKSILVSIKAKNKVVTKNINRAKMKDGRQQKIQLTPRGALHNETVYGKIRNYEAEYRKVDGKFTEDVILRVCNQRQREALLSRLTEYDNDPKRAFTGKNSLEKNPIWLKADHSYAVPLKVKLYKIVDVFTIKKAVDKDLKIDKVIDLKIRSILQARLNEYNGDASKAFANLDENPIWLNQEKGIAIKRVKIRAKVSSETSVPLHVKKDLLGNILKSSDGIALPTDYVNTASNHHVAIFIDAEGNWHEHVVSFYEATACAMLGLPIIDKNFKSEEGWKFLFSMKQNEYFVFPNEKTGFVPTEIDLTDPENYAQISPNLYRVQKFSSSFYVFRNHLETNVEEPTMLKDTTWKSIRSIRNLDGVVKVRVNHIGEIVEVGEY

SEQ ID NO: 23790 - protein, 1200 aa, unidentified
  REGION 1..1200: note = Cas Enzyme sequence
MKYILGLDPGIASIGWALIQEAENADEKSRIIASNVVKVDFDNFTFINGKGKISDGNAIKMYQKGYTVSPNLVRRQKRGAHRNLQHFKLRRSALIVLLRENGFIDDDTLLCEDGKGTTYETLTLRSKAASEEVSLSELARVLLMINKKRGYKSSRKGEVDADEENMGEYLAAITGRSKLLADNHQTVGQYLMSQIALHPLQGIKRQTFYRKDYEDEFEQIWKTQIQYHPELTRKLKKEIKNRIIFYQRPIASKKDELSICELECKEIEIEKDGKKKTIKTGSKVCPVSSPLFQEFRMWQKLNDVILTNINTLEKRYLTFEEKELLASELSIRSRLTKRDVIKILVGKQAKYFDLNFDELIGNETQSRLVNAYLKILELTGHDKIDVKKSKAVDVVEAIRQVFAGLGYHTDAIDGQVTFQTDIYLQPYYRLWHLLYSFPGDNSRSGSDKLVQRVKEFFGFDNDEYAKVIADIKFADGYGNLSAKAIQKILPKMKEGYQYYDACEMVGYKHSKRSLTKEENDNRTLQKHLDFIPHNSLRNPLVERILNQMISLVNSLVDEYGPTYGTFDEIRIELARDLSKNAESRKRMTQDIENNKNERETCRKELIEALNERGYKVNYVSENDILKYRLYKELAPLGYKTLYSKTKVDLVDLIINRKFDKEHIIPKAKSPSNAFSVLTIELSSINEEKGDMTALEYVKWKYGEEEAQQYIARVNDLFKLKAISKAKKDNLLRTAAEIPDEPLNRDLVLTQYINRKAYEILSAITRKVVPTTGSITSRLRDDWQLVDVLQELVWDKYDKLGLIDSYTDKDGRTVRKIKEEAWTKRNDHRNHAMDAITVAFTKQAYINYLNSLNAEGEKREQLMKMRQKNLHRDKQGNWRFNPPMPLGDLRAEVKRQLESIIVYQKPASSAVSPNQNVTKTKKKKEGNRQIQLTPRGKLHDDTYYGSIKEIKPGVGEVITFTKRVEVNESLNVDDVVNKNAQDILKERLRECNNDPKKAFANLDENPIWFNREKGICIKKVTIRINKDLKPIHKKKNHKGELLLDKDKQVQSADYVLTNNNHHVAIYEDEHHELHEVVVSFFDAVDRGIHNKPVIERTLNADKGWRFLFSLQQNDCFVFPDVGFNPSEIDLTARENYALVSPHIFKVQTMSKGDYRFRHHHDATKDYNSSLKNLTWKRIRTLNDLRGLVKIRITKTGHIEYV

SEQ ID NO: 23791 - protein, 1403 aa, unidentified
  REGION 1..1403: note = Cas Enzyme sequence
MTKRILGLDLGVSSIGWAIVDEDVKNPKNNRIVKLGVRVNPLTVDEQTNFEKGKPITTNAGRTLARSARRNLQRFKLRRENLLDILVKNKILNEDDVLTESGKNSTFQTHALRAKAAKERVELNEFARVLFLINKKRGYKSSRKIQNDDEGTAIDGMEVAKKLYEEGLTPGEYAYQLLKKGKKKIPDFYRSDLQNELDKVWKFQKQFHPEILTDDFKKELEGKGQRATMAVFLNRYKIYTADNNGTRDEKKLKAYEWRSKAAVKQLDIKEVSYVITEINNNLNNSSGYLGAISDRSKELYFNHQTIGEYLYNQLCSSSHARLKNQVFYRQDYLDEFERIWETQKVFYPVLNARLKDDIRDVVIFYQRKLKSQKGLISFCEFESREIEIKDNVKAKRKKVGLKVAPKSSPLFQEFKIWQVLNNIEIKNDEGKRPLDWEEKELLFDELNIKGNLSSQTVLELIGFKAKDVKINFKLIEGNRTNEKFYHAYLKILELEGYNIFELLKIKEDKDDVKLSDLKAPATTIKEMIKSVFEVNHIDVSILEFDAEVSNQEFEKQPFYQLWHLLYSYEADDSASGNEKLYELLNKKFGFKREHAKILSTITFAQEYGSLSSKAMRKIYPYSKENKYSYACSLAGYNHSKDSLTTEELEKRLLKNTLEILPKNSLRNPVVEKILNQMINVVNAVIDEYGKPDEVRIELARELKKNAEERAEMNKSINDATLLHQKYAEILKKEFNVPNPSRNDIIRYKLYLELSNNGFKDLYTNTKIEKENLFTNKYDIDHIISQSRFFDDSFSNKVLVPRQANLEKGNLTAYDFISGKGKDREEHFLNMIKELFNGRDITKAKYEKLQKKGSEIGEGFIERDLRDTQYIAKKAREILFGITNSVVSTSGNITDKLRDDWNLVNIMKELNLEKFRKLGLTEMVINSKGEEKEVIKDWTKRNDHRHHAMDALTVAFTTHNHIQYLNYLNARKDEKHKEHHHIYAIENVITEVIEKKNGSQSRKFKSPMINFRKEARKHLEEVLISHKAKNKVATSNINKIKQKGGIVKKTELTPRGQLHKETMYGTAKILQTKEEKISAKFDYNTILKVQNKEYRNALLQRLVKNDNDPKKAFAGKNGILKTPVYLHDDKKDPIPEKVILVWYDNIYTIRKSVNPENFKDYKNLEKIIDPITRELLKKRLDDFNGNAKEAFSNLDKNPIWFNEEKGISLKTVSITGVSNVESLHFKKDHFGNEILDDNGNRIPVDFVSTGNNHHLAVYIDADENLDDGMVSFYEAVERVNQNQPVVDKNYNAEKGYNLLFTLKQNEMFLFPSEDFIPNEIDLFDERNLAVISKNLFRVQKISKVGYGNSFVRDFVFRHHLETTVEERKELRNITYVQLKSLEGLRGIVKVRLNHLGKIVQVGEY

SEQ ID NO: 23792 - protein, 1661 aa, unidentified
  REGION 1..1661: note = Cas Enzyme sequence
MEDLKLKKVLGLDIGSNSIGAALVEVPEKNEEYGKFGRIIFTTSRIILTDTNLLNHFEQGEKLETPAKSRTAKRSMRRRIERYKLRRARLTMVLRHLGWLPQDFPPFESPSKIKNKLFEILNTPKELREHNINYYSLKISDFLKPSDESIQEFYQEFGLDYNISKEFKKLPDDWIVYYLRKKGLHKKLSYSELALILYMLNQRRGFKSSRKDLKDTEQVPYEKFEETIKEKPDSKIETKFATITKIVKVEPVYDEEGKPKISKGKTIYRINVDDERVEPWDDNFEKEPKIVGKEVTLVVTKKYDKGKITQLKPKEPDENNWDLCVVAQDNKMGLKHPGEYFFDEILRAYKDNKHVKIRQYAVYRAKYIKEITEIWKKQLELNPELATLNQNKQLMAELAQILYPAQSKIKAGKYLEFLNNDLFHVIFNDIIYYHRKLKSQKHLISECPFERRQAIKIDKNGKKILYDIRGLKCIPKSSPLFQEFVAWKNINNLKLYLIEGKYDVDVTEKYLTEDVKEKLFEVFKRKSEVKINDILKTINEVIPDSVNYIRNNKKKGEEYNVRINLVNKDGEIKGNQTVSHYLNLLSKITDKSNDIISDDEFIYKLWHLEYSQNASTLDDLKENLSKGLRKIAINYPEIVEKADELADLMSKSSLIGDKDYGGFSALAIKKMLIVMRCGKYWKDPDILIQEFKQKLNNETNKKRAKEITNFITFLEKVKEQAQNIKQRIDLIRNRTLKIEEVADDIVKKQVIKSFMEKENLEDFYKGLKEHQATYLIYDQHSEKRFQKYLSYEDISKSINELEKSAIKNPIVKSVIRETLLLIRDIWEKFGYIDEIHIELARELRASSEQRKQIAENMRNKEKERERARQMLIELVNKGYFKNSVIPNPNRNDDIRKFLIYEQQVKGFYNKPKDKEFLTYAAWLEQNCISPYTGKTIPLSKLFDGTLYQLEHIIPRARYFDNSLSNLVVCESYINKAKGNQLAAVFIKNSNGRCKDGDKFYDLLTYDDYVAQCKNLFYYKNKAKYKNLLAEEVPENFISRQLNDTRYINRKLAEMLRPIPRDEQGVIVTTGSITDMLKRDWGLESLWKDMMVPRFKRMERILENELDKDDISDEKRKYLEEKLALIKKNLYFITKHNDTIIEEPELAPNEKIDIKRLDHRHHALDAIVIALTNRRHIQLINTIHAMDESKKPSYNNNNDDFGKIYKYLEKEDKIKYTLPWINLPFDTKNALDECMVTFKAKNKFITKPVNKILKWVEQNGRLEKAFVSQEKNPRWMAVRCQIFKEQPFGPIWIKYVEQKSLSDAIKIELKRKIEKASHLEVGYVYDKHAREVIKRFIDEITNEVGFQKIEDYSNLILKQIPKKGKNYILDGIEYEKIPVAKFELNKAKRKALSKEMNIKYLRDKVPYFFLDREIFEKYRDSYPKVYQKYLNSLEDKKNTIAYELILEHLIQYNDDASKAFSTEGQEELNKRALANPKFQKTINAVTILDGELDKKMLRYNSYFETDTNVYFTIAEDPKTKERTNNKSIRIIEVLDSKLNGKPLFEIEDGKKLLVFKPYDIVYVPTKEEIEQIKSGAEINEVIDWNNKKKIIERCYYLASTAENTFKAKILTFANFLIKPEKGFSGEVGWENKTKVALDEDTDIAKNCIKLKVNRLGNFEPIL

SEQ ID NO: 23793 - protein, 1437 aa, unidentified
  REGION 1..1437: note = Cas Enzyme sequence
MKKILGLDLGTNSIGWAVVNEAENANEISSIIKLGVRVNPLTVDELTNFEKGKSITTNADRTLKRSMRRNLQRYKLRRDNLIEILKSHGFIDDETILSENGNRTTFETYRIRAKAATEEITLTELARVLLQINKKRGYKSSRKAKSTEEGQLIDGMEIAKRLYNENLTPGQLCYQILNNGKKYLPDFYRSDLQAEFDRIWDFQKQFYPNQISDSLKEELRGKNKSQSWAICAKPFGLVGIKRTTKGLDLKLENYKWRSDALSQQLGLEELAIVLQEINGQISNASGYLGDISDRSKELYFNNQTIGQYQMAQLKKDPNYSLKNQVFYRQDYLNEFEKIWETQAKFHNELTPKLKKEIRDVIIFYQRPLKSQKGLISFCEFESRQIEVEIDGKKKLKTIGNRVCPKSSPLFQEFKIWQILNNVQVIGKVVPNLQTDLLGHTESSKHGKRFLYQEEKEKLFAELNYKEKLSKNDALKLLFGNSKDLDLNYKQLDGNHTQAELFKAYQTIIELTGHGEYDFSKLPAEKTLETVSSIFNGLGINTNILLFDSSLEGQALEEQPMYKLWHLLYSFEGDNSNLGNEKLIEKLRETYGFDKESAITLANVVFRDAGEYGSLSTKAIKKILPHLKDGLDYSVACEYAGYRHSKNSLTKEEIANKTLKDKLELLPRNSLRNPVVEKILNQMVNVVNGIVTEYGKPDEIRIELARELKKSAKERDEMTKSINETTRYHEEYVKKLQGEPFYLEHVSRNDIIRYKLYLELKDNGYKTLYSNTYIPQEKLFSKEFDIEHIIPQAKLFDDSFSNKTIEVRQVNLEKSNATAFDFIADKYGDIALQDYVNRVERMFNDKVISKTKRDKLLMKEADIPSGFINRDLRDSQYIAKKSREILEELVRFVVPTTGSITDRLREDWELVNVMQELNWDKYNQLGMTEIIEGRDGQRIRRIKDWTKRNDHRHHAMDALTIAFTKRSYIQYLNNLNARVQKGVDEYFDLDMVELADLDKGKRAAAVYGIEKKELYRDSKGKLRFKPPMPLDEFRAEAKRQLENTLVSIKAKNKVVTQNVNISKKKTGKNKKIQLTPRGQLHLETVYGKSKQYAVKDEKVNASFDETKIMTVANKRYRDALLSRLQQFGGDAKKAFTGKNTLEKNPIWIDVYHKDSVPEKVKTVYFEPIYTIRKEISPDLKIDKVVDVGIRNILKSRLYDFDGDAKKAFSNLDENPIWLNEEKGIAIKRVTITGISNAEALHEKRNKEGKLILDENGQAQPIDFVNTGNNHHVAIYRKPKLDKNGQQIVDENNIPQYELDEIIVSFYEATARAMQHIPIIDKEYKKNDGWQFLFTMKQNEYFVFPRYDEDGNMTFNPLDHDEEWYKNPDNYAIISPNLFRVQKISTKNYMFRHHLETVVGEPKPLRDTTWKLIQTPSNLTGILKVRVNHIGQIVSVGDY

SEQ ID NO: 23794 - protein, 1361 aa, unidentified
  REGION 1..1361: note = Cas Enzyme sequence
MKKILGLDLGTNSIGWAVVNEAEKVGEKSSIVKLGVRVNPLTVDELSNFEKGKSITTNADRTMKRSMRRNLQRYKLRRENLIELLKENGFIDDYTILSETGNRTTFETCRLRAKAATEEISLKEFARVLLMINKKRGYKSSRKAKSTEEGQLIDGMEIAKRLYEENLTPSQLSLQLLESGKKYLPEFYRSDLLSEFNMLWDAQKQYYPELMTNELKEELQGKNKTQTWAVFAKYAHIVGVKRTTKGYELKKENYQWRCVALSEKLDLEQLAVVLQEINGQINNASGYLGNISDRSKELYFNKQTVGQYQMAQLDKNPNYSLKNQVFYRQDYLNEFETIWETQAKYHHELTRELKKEIRDIVIFYQRPLKSQKGLISFCEFESRRIEVEIDGKKKTKTIGLRVCPKSSPLFQEFKIWQILNNIQVISETEGKRFLYQEEKEKLFVELSYKEKMSKSEVIKLLYSNQKGIDLNYKDLEGNKTQAALFKVYQTIIEMSGHGEYDFSKIPAAKAVEIVTEVFACLGFNTDILKFNASLEGKAFEQQPMFKLWHLLYSYEGDKSELGNQKLIEKISEKYGFEKEYATVLAGVVFQDDYSSLSSKAIRKILPHMKDGLEYSVACEYAGYRYSKNSLTKEEIANKVLKNKLELLPRNSLRNHVVEKILNQMVNVVNAIIDEYGKPDEIRIELARELKKSAKEREELTKSINQNTRLHEEYVKMLQAEPYNLIHVSHNDIVRYKLYEELKLNGYKTLYSNTYIPREKLFSKDFDIEHIIPQAKLFDDSFSNKTLEVRQVNIEKGNATALDFVGEKYGENGMIDYKSRVDNLFKNNVISKTKYEKLLMKEADIPSGFINRDLRDSQYIAKKAQEMLNELVQYVVPTTGSVTDRLREDWQLVDVMQELNWDKYNQLGLTEIIEGRDGQRIRRIKEWTKRNDHRHHAIDALTIAFTKRSYIQYLNNLNARIQKGVDEYFDLDMVELSDLNKEDRSSAIYGIEKKELYRDNHGKLRFKSPMPLEEFRAEAKKQLENTLVSIKAKNKVVTQNVNVSKKKVGNNKKIQLTPRGQLHLETVYGSMKKTVVKGNKISFETVYTIRKEVSPDLKIDKVVDAHIRQILQSRLDEYNGDAKKAFSNLEENPIWLNKDKGIAIKRVTITGINNAVPLHDKHDKDGNLILDVNGNTQPVDFVSTGNNHHVAVYRKPKLDKNGHQLFSVDGKPLYDFDETAISFYEATSRAIQGLPIIDKDYRTKEGWQFLYTLKQNEYFVLPRYDEQGNMVFNPLEYDETWYKNPDNYSEISPNLFRVQSISRVTYGNSVVRDYIFRHHLETTVTSKLKGVTYQQFKSLSFVPWIIKVRINHIGNIVSIGEY

SEQ ID NO: 23795 - protein, 1202 aa, unidentified
  REGION 1..1202: note = Cas Enzyme sequence
MKTLGIDLGTGSLGWAILDDLTGDILDKGVVVFPEGIDAASDSLETPAAIRRAARMGRRMKFRRKMRKWALLKILIENGMCPMTLEELEAWRRKGVYPSGNVAFVRWLGSTDAANPYVDRAAAASGRVAPHVLGRALYHIAQRRGFKSSRKDAAEGESDKDLGRVKGDIAALTKEISDAGCRTLGQYFAKHLDEERRCVAKTRIRKRYTGRVEHYMTEFAVIMEAQGIAHDSDLYKGLYKAIFLQRPLRSQKHLVGMCPLEPKSPRAQIGHPLFEEFRMRAFVNNLSFEKANGDESDGEREKVPLSASDRELACTAFAKESPTMKFSAISKLFRKKFREESLRFHHYTDADTVTTCYIRSKIGKCFGVIPYDEQTVFDALTFFDDDTKLVEWFGKHYPQLSEESVKKLCAIHPKEGNAQYSLKAIRKILRFLRKGHDLFMARILAKLPDVMEDFDAKEDEIVLHLNELSIRHRAMRERWANEKFHETERLPRLVEDMFWEYFRDRWGFDEKKWNSLYLRGEAAYIVDKDRPDRLPAVNLGMIRNPLVQRSMTTLRRLVNYLRDHGKIDEATTIRIELARGVNDYATRNAIRLWQKDREAERENAKAELLEFGAAATEDLVDRYVLWEEQGRKCLYTGKQISLGDLLAGSAFDVEHTIPRSMSGDDSMANKTLCDATYNRQVKKGMVPTDCPNYESEIYTNLAPWRKKVEELEKICRARMNAARGTADPSARAAARIRALRTKFELGYWRDKVRRFEIGSDRLADPSEGLSGFKRRQLVDTGIMCSHAVDLLRSVYPKVYSVNGAATAFARKAWGIQADDTKDRSEHTHHAKDAMVIAALTPGRFNAICTALKDDGATIFRRPCDVCKPPFDGFAEKVRNAAGEILVKHVLRQTALRQSSKRNALAKAHPQKDNPSKTVKYVNSRGDTVRGALHKDTFYGCIVNPSDGKKSFVVRKTLEGPIAAVEGITGKIVDGAIRSLVESALKKLKAEGVKNLEPGMIRMPSGVPVNKVRIVAHTTNPMRLRDHSMSSDKDYKAPYYVTASEGSNFRLGVFRNGEVLSAVPDNLLVWAQRHKHQDYVPLDKKPGFVGYIVPGAMAIATEDGTVDAVRRLDATEISKRLYVVVKFENTGRVTFRRHLEARASVVLAKDLLSAGKHKAGESVIDFENSHELLYLSPRTFLGKMLFEGVHFKMQLDGTIIFLK

SEQ ID NO: 23796 - protein, 1398 aa, unidentified
  REGION 1..1398: note = Cas Enzyme sequence
MKKILGLDLGTTSIGWALVNEKEAEGEKSSIIRLGVRVNPLTVDEKTNYEKGKSITTNADRRMKRSMHRNLQRYKLRRNNLIDCLLEHHIITDETPLNEQGNNTTFKTYRARAKAVTEEISLDDFARVLLMINKKRGYKSSRKVKDGEEGELIDGMEIAKRLYEENLTPGQLLLDLYKKGKRNRPTFYRSDLQAEFDKIWEVQSAFYPNILTDDFKSSIHGFNKTQTSGAFYGVHQVFTAKNSGKEGYVQSLTWRTEALKHKLDIEEVAYALADINGAINNSSKRLAMISDRSKELYFNHQTIGQYLMQRLDENPNNSLTNIIFYRQDYLDEFEAIWEKQSKYHSELTPELKKEIRDIIIFYQRDLKSCKNLVSYCELEHTEREINIEGKKKTILTGCKVCPKSSPLFQTFKIWQVLNNLQVSVIGTQRKKNKKNKSELSLFNDVEAGALNRFLTQEEKDILYNELSIKDKMSKKDVLKLLFDNPKDLDLNYKEVEGNRTMATLFKAYQDIISLTGNGEYDFSKMRTNEVMAITTEIFAGLGYKTDFLSFDPLLEGKALEKQPAYHLWHLLYSYTGDKSVTGNEAMLNRIKEICGFEKEYAIILANVSLALDYGSLSAKAIRKLLPHMMKGYEYSEACKMADYNHSARSLTKEELANKDYKSHLDEIKRNSLRNPIVEKILNQMINVINEIVRTYGKPDEIRIEMARELKKSQEERELLDAAIRRNTTESEKLRKELEEEFGISHVTKNDILRYKLYNELKLNGYKTLYSNTYIPREEIFSKRFDIEHIIPQSRLFDDSFSNKTIEARDVNIEKGNMTAYDYVAEKYDDKGLVDYESRVEELFRNNVISRTKRNNLLMKEKDIPSDFLERDLRDSQYIARKAREILEEMVPFVVTTTGAVTNRLREDWQLINIMQELNWDKYDTLGLTERYTDKNGNIVKRIKDWTKRNDHRHHAMDALTIAFTKRSIVQYLSNMNARSDKSSSIYGIEQKELHRDEKDHKLVFNAPMPLDEFRAEAKKHLESILVSIKAKNKVVTKNINKAKTKDGYQQKVQLTPRGALHNETVYGKIRNYEAEYRKVDGKFTEETILRVSNQKYREALLNRLAEYGNDSKKAFTGKNSLEKNPIWLDKDHSYAVPPKVKLYKIVDVFTIKKAVDKDLKIDKVIDNKVRAILQARLDDYNGDASKAFSNLEENPIWLNKEKGIAIKRVKIKAKVSSDTSVPLHVKKDLLGNILKDGEGKVLATDYVNTANNHHVAIFIDSEGNWHEHVVSFFEATASALLGLPVVDKNYKNEEGWQFLFSMKQNEYFVFPNEKTGFVPSEVDLMDAKNYPLISPNLYRVQKFSSLFYVFRHHLETNVDESNELRGTTWKRITSIKGLDGIVKIRVNHLGNIVAIGEY

SEQ ID NO: 23797 - protein, 990 aa, unidentified
  REGION 1..990: note = Cas Enzyme sequence
IGQHFYQELLRSKVESGNGPYYTFRIKDKVFPRAAYIAEFDQIMKVQKKYYPEVLTAELIDTLRNRIIFYQRPLKSCKHLVSLCEFEMKPYKTKDGKIVYGGPKCAPRTSPLAQLCAMWETTNNITLTNRNNEQYEFTMDERRQIVEHLCTHEVLKLTDLYKILGITKKDGWYGGKAIGKGIKGNATLNQLRKALNGKYGEWLEMPIERVDAVDNETAEVFWQVSPKVEETPLFRLWHAVYSIQDADELAKTLRAKFGIEDQEVIDALCKIDFVKPGYANKSHKFIRRLLPYLMEGMQYSEACTRIGINHSNYMTAAERDARPLAERIELLQKNALRQPVIEKILNQMINLVNRLQQEYGPIDEARVELARELKQSREERENAFKRNNQNERLNKEIADKIEEMGIRPSRSRIQKYKMWEESNHRCMYCGKTVSLAEFLNGADVEIEHIIPRSILFDDSFSNKVCACRECNHEKDNMTALDYLETKPAVEVDAYKQRVDEAFKEGRISKTKRDHLLWHKSDIPQDFIDRQLRQSQYIAVKAVEILQQGIRQVWTSGGSVTDCLRHQWGYDEILHTLNLPRYRQVEDLTEIVHYEHAGQEHDEERIKNWSKRIDHRHHAIDALTVALTRQAYITRLNSLNAEFTREEMLKEVEEANTVYNEKKSLLEKWVNEQPHFSVEDVTQSVDGILVSFRAGKRVTTPARRAIYNGGKRTIVQRGLQVPRGALTEETIYGKLGDKFVVKYPLDHPSMKPENIVDPTIRALVQKRVAERGKDAFKEPLYSAEGMEIKSVRCFTSLSENGVVPVKQDEQGRNIGYAKKGNNHHVAIYQDKDGQYQEMVVSFWEAVERKKYGVPVVITNPRAVWDSVMDKDLSQEFLEKLPKDDWTYILSMQENEMFVLGMEEDEFNDAIESHNYAILNKHLYRIQKISSREYIFRYHTETKVDDKYEGVENGRTTSMVLGALVPMKSISALLRQFPHKVKIDIMGRITKV

SEQ ID NO: 23798 - protein, 1376 aa, unidentified
  REGION 1..1376: note = Cas Enzyme sequence
MKKILGLDLGTTSIGWAVVNEATNDREKSSIVKLGVRVNPLTVDEQTNFEKGRPITTNADRTLKRSMRRNLQRYKLRRENLINCLKEHGFINNDSILCEHGNKTTFETYRLRAKAATEKISLQELARVLLMINKKRGYKSSRKAKSTDEGELVDGMTVAKTLYEENLTPGQYSLQLLRSGKKYLPDYYQSDLHAEMLKIWYKQQIFYPDILTPDFMKALEGKSKSNTSKIFYARFGIHTADNKSKDKKQQAYQWRVDALNRQLTIEEVAYVISDLNGLINGSSGYLGRISDRSKNLYFNKQTVGQYLMQELDKNPNYSLKNSVFYRQDYLDEFEVIWNTQSKYHPELTPELKKELGNIIIFYQRPLKSQKGLVAICELENEQREVEVDGVKKLITIGCKVCPKSSPLFQEFRMWQRLNDIVIYDSNAMPDFFGNGRATKRRLTEEEMNTLAFELSIKGKMTKQQMLKCLFGKTAGLDMNFKDIDGNETQAKLFEAYLKIIEMTGHEEYDSAKLNASQILDVVEKVFTGLGFNTAPLYFDASIKGKQFDKQPMYQLWHLLYSYEGDNSKTGDNSLIKKIRDIFNFDNDDYAKAIAAVSFKPDYGSLCAKAIRNLLPIMKKGIDYSEACKSEYGTHSKRSLTKEELDQKELKDYLDMLPKNSLRNPVVEKILNQMINVVNEVVTTYGPIDEIRIEMARKLKKSAKERERETNKINTTTAYHEEIKKILQAAPFNIEHVSHNDIIRYKLYEELKENGYKTLYSNKYIPKEKLFSREIDIEHIIPQARLFDDSFSNKTLEWRSINQEKSNATAFDYVRGKYGEAGAKEYKQRVDELRKQEVISKVKHAYLLMSVEDIPSNILNRELNDTQYIARKAREILEQIVKIVVPTTGKITKRLREDWQLVNVMQELNYPKYEKLGLSETFEKEWTKRNDHRHHAMDALTIAFTKQSIIQYLNNLNARSDKSSSIYGIEQNELYRDKHGSLRFLPPIPLDEFRSEAKLHLEQILVSIKSKTKVVTRNANKSKSKKAGKGYNKRVQLTPRGQLHNETIYGSSQRYVTKEEKVGSSFDVEKISTVTNKTYREALQHRLEAYNGDVKKAFTGKNSLEKTPIWLDDLHTRAVPIKVKCATMDTIYTIRKPISKDLRIDKVIDKHIQDILRARLEEYGGDANKAFSNLDENPIWLNEEKGIRIKSVAINAGLSKPEAIHEKRDHCGQLIFNEKGNKQAADFVQTANNHHVAIFRDAEGKLQEHIVSFYEATMRANQGWPIVDKEYNQAEGWEFLFTMKQNEYFVFPDKDFCPSEYDLMNPANYAFISPHLFRVQKLATKDYFFRHHLETTVEDKNELRNMTWKRIRNCDGLKGIVKVRVNHIGQIVAVGEY

SEQ ID NO: 23799 - protein, 1361 aa, unidentified
  REGION 1..1361: note = Cas Enzyme sequence
MKEKVVGIDLGTGSLGILLRNLELGDNIIDQLEWFSVTTFNAGTGMSQTGEYTLASDRRSHIQSRRLKEHSRWKRWATLALLIEYDMCPMTPDSLEKWSVYDKSKNLKREYPVDDLDFNQWIKLDFNGDGIPDYSSPFQLRRELVEKQLDFSQPENRHKLGRAIYHIALHRGFKSSKGETLAELEEGNKDTLISTDEIDSAMKKSEEKKSKDLTEYMESHHLKTVGQAFACLEDEGVRIRNSRYQAVRSQNVDEINEYFQFQQGLCGYQDLHKRLISTKKGVGTLFYKLPLRPQKGHIGKCTFEKNKRRCPISHPEYEKYRAWAFINNIRYKESSEDAWKELSLDIKYQLYQEVFVSKVRKDFLFEVIRKFLEKQLGLTLVNTENSKTINYKDNTLVAGCPVTARLQNIADYFGTDLEHFVQKGTKTRETHTNRPEREKHTVVYRAMDLWNFCFDTDEKEDVTVFAHNSLGWDEQATDKLCKLWNAMDQGYATLSLKAIRNINRMLVYGLKASDAVFLAKVPDITGMTEDGITELIETYIDRIKGQVDKEVRTCRIANIMIANYKSLPVGDRFADHDYNYQLRDDDKQAVVKCIVDNDRDFSLLDAVEQQEVIDRVTKLYQSFFADIHRDFVKAPRIVDSLKEELSKRYPGIEDNKWEKMYHPSLLSDFPRDKNNTNHLGSPNIGAIRNPTVLRTLNVLRSVINKMIDEGLIDPQETRLVVETTRVNNDINKRWAIHKYNEERRDENKVIEKILQEYYPDKVINDTDIDVARYVLEQSEADLYSDDSRYQHQIKKYKLWLEQGCQCLYTGKIINLSNLLDGDMFDAEHTVPRSLSFDSSDKNLTLCDSYYNRHIKKNMIPSQLPNYEHDVVIDGHTYTAIKPRLEKWEEKLERLSKNVIFWKNKARRAQTESYKNTCTRQKLLWQMEYDYWRSKLDKFKMKPSDLTDGFRNSQLVDTGIITKYALLYLKTLFRSVDVQNGQSTSAFRKIFGIPEKDRSTHYHHAVDAAILTLIPASAQRSRMLKLFYEIDEMKRGGHEYSGLQYQLNKEIENCGIGKGTAEIDQYIERNVFADYYKQDRTLQNANGIRGKLHAETFLGAITQWNSEDKKYVKRVELKFKKSSLDSGFKSWEEVEGAIVNKQLVKMMKSQFPEGTTFQNACEQGIYMLNKKGERANRIRHIRIEVKEKHPLAIKRHTYLSAKDYKQYYYAGMGDLYVMCEYQNQQEKTYQIYSLFSIAENRKYGVEDIPSTIIGKKGNRLTLNRVIKPGDMVLLYKDSPEELYDLDTTALSKRLYRVPNGAFESDGRISLCHHLCANPAKGQAIKDYENLPSNIRCGASTIKFLQKDVDFTFEKGKIIFARL

SEQ ID NO: 23800 - protein, 1510 aa, unidentified
  REGION 1..1510: note = Cas Enzyme sequence
MKKILGLDLGTNSIGWAVVEKEDNNGRIIKSGSRIIPMDAATLGDFASGNTKSQTADRTSKRSARRMRERFLLRRERLHRILQTLGFLPSHYANRIGWDLDNDAKHYGTFIDGEEPKIAWKKNNDNKYEFLFHSSFLEMLEDFNLHHPNLVSNGQKIPYDWTLYFLRKKALTQPIDKEELAWIILNFNQKRGYNQLRDEILESTDDKREEYLCLTVKSVTADNTSNGKDTWYEIRFEDSDIIYRRKSKYPLDWVGKKRNLIVTTKLSEDGKPKLKKDGSIDYSVKSPGEDDWALLKIKTEQDLKTSSLTVGQYIYEALLANPSEKIRGGLVRTIERRFYKEELDLILKKQSEFHPELKDRTLYEKCIYDLYRNNESHRNNISRNDFTYLILEDAIFYQRPLKSKKSLIDDCPYEYHQGVNRETGEICTYPLKCIAKSNPYFQEYRIWKFLGDLRIIANTKEVNGHIQSDVDVTIEYIPDTNSLAQLFIWLNDKGSIEQGELLNHLGIKKKEHDKYRWNFVVDKKYPMNATRHAMLSKMQDGEKLSRELEQTIWHLLYSTKSKEEIDKSLSGSRLYKRLLSEGISETTIEKLKSVKLPDEGYGSYSEKAIKKLLPLMRTGMMWNQQDISANTRLRIEQFTKGKGLDDFSENVKKKILSLPTIEAYQNLPEWLACYVVYGRHSEASDIVKWKDPNDINIYLNNFKQHSLRNPIVECVILETLRVVRDIWMRYGNIDEIHVEMGRDLKNPSEKRRMLTQRILENENTNIRIKALLAELTNPEFDIQDVRPYSPSQQDLLRIYEEDVLAHNEPDEEIRDIIQILSNPTKQPSRSQVLRYKCWLDQKYCSPYTGQPIPLSRLFTPDYEIEHIIPQSRYFDDSFSNKVICESEVNKLKDNDLGYEFIKKHHGQTLQLASGRMVRIFEVNDYERFVKDTYGNLKSAPKRRRLLMDEIPAEFIQRQMNDSRYISKVIKGLLSNIVREIDENGNLEREAISKNVITCNGSVTTRLKRDWGLGEVWNYIVLPRFQRLNQLTGNTCFTTLNTHGQEIPTMPLELAKGFNIKRIDHRHHAMDAIVIACTTREHVNLLNNESALPEHQEMKHALSHKLRRCEEIVINGKKRNIYKEFIMPWASFKNDAYTSLQQIVVSFKQNLRVLNQATNLYSKYENGLKTLTPQHSSDHYAIRKSLHKDTVFGHVNLQRKTTIKFKDALKDVNRIVDKRLKRKVKELRAKHYNDKQLLVYFKDYAYEWKGYDFNKIEVFYFTDEKEKMVATRFCNDLVSIFSGKTKKQDIEKVISQITDTGIQKILTNYLHANLDKIEFAFSAEGLEKLNENIAHYNNGKQHKPIYKVRITETLGQKFSIGITGNKTSKFVEAAKGTNLFFAVYMNEDGVRSFSTIPLNIVIERLKQHLSPVPERNEKGDNLLFYLSPGDLVYVPMSDDANIDTTHPDRIYKFVSGSSYQGFFTPYSISNPILQTTELGSNNKSERAWSGEMIKTICIPLSVDRLGEIKRK

SEQ ID NO: 23801 - protein, 916 aa, unidentified
  REGION 1..916: note = Cas Enzyme sequence
DAVMLANLPTIMGGAFFKQNEQDIVNLIDEEKAAISDANRIYDIANKLISDYKALKMEGYAFAEHNCDYTLQEDDINDVKKACAENYGKVWETMTDVQQSEVITRVADLYQEFFFSRKRDYYKRINLSEALKNALAEKFPSLTKNKLKKLYHHSDNAYYPSAQANEDGILQLGSPARGNLRNPTVLKVLYKIKQNVNKLLLSGDIDSDTIIVVENAREALNDFNMRWAIEEYNSKRERENKAIEDALNDLAKEFHFTLPKECVPMARLALYQNANFTPYNPNESRRLYDKLCEKYKLWLKQGFFDFYTGRPISLSELFSPDNLVEVDHILPISKSFDDSVSNKVLSSSRYNSTIKGTKLPCELPNYNVDTPEGSAIIHRIDEIREKVKYLEDKVLYWKGRSSRAADPDSKNRAIKQRHLWQMEYDEWNQRLTNLTAKEITPSFRNNQLNDTRTISKYAYHYLKSVFGRVVVQRGETTAVFRKIFGFQEAYEKKDRSRHTHHAIDALTLSLIPYGPKRERMMELWYQIQEAHRYRAYSLERQLKDRLEREKALCGLGRYSPDEVIRYIEETTLVRNDATNHALTKNIKRYRVRGKVVPLRDENGNIVYEKTAKGIVRVKAKHVSQGNSIRGAIHDQSFYGKIEKWKDDGSHEKEELYVIRRKIEYKAGNVGSGFKSWDDLEKQMVDKKLFKKFKKQHQDKSFKDACAEGFYTYVVENGVRRKVRVRHVRCLAITAQPLKKHIFQPQHGGKEQFYYVSPGEAYGVFEYVSMDGERLYESDNLFTLSEKMKNGNLTETPCPKHITDKKGKTYNYTRTILKDATILIYPSMESAEDQYRSDAATISKRMYRINTIETQRKRLTLTRHNIVKSWTGKNTIDDTDFKDLPDGMRMPITKLHFLLLGTDFDIIDGKIVPLKNN

SEQ ID NO: 23802 - protein, 1398 aa, unidentified
  REGION 1..1398: note = Cas Enzyme sequence
MKKIIGLDLGTNSIGWAIVNEKENDSEKSSIIRLGVRVNPLTVDEKTNFEKGKSITTNADRRMKRSMHRNLQRFKLRRKNLIECMLENGIITEDTPLFESGNRSTFNTYRARAKAVEEEISLEDFARVLLMINKKRGYKSNRKIKDTEEGELIDGMEIAKKMYDEHLTPGQLLLDLLKKGKKNKPVFYRSDLQSEFDKIWEVQSVYYPDVLNEEFKQRIKGFNKTQTSGAFYAIHNVSTVKNNGKGGYEQALEWRTKAIKEKLDIEIVAYVLCDINGAINNSSKRLAMISDRSKELYFNHQTVGQYLMEIINHNPNSSLKNIIFYRQDYLDEFEAIWERQAQYHPQLTPQLKKEIRDIIIFYQRDLKSCKSLISFCEFEHKDKEIVVDGKKKTIITGYKVCPKSSPLFQDFKIWQVLNNLKVSVNSRKLKRIKRNDGQLPLFDSLDDEPGNRYLDQEEKDILYKELTFKEKMSKKDVLSLLFENPQTLDLNYNEVEGNRTMAAFFKGFQDIISLTGNGEYDFSKMPADEVLATTSDIFSGLGYKTDFLQFNPLVQGKDLDKQPLYRLWHLLYSYSGDKSITGNDALLRRISEICGFEKEYASVLANISLPIDYGSLSAKAIRKILPFMMKGLEYSEACEKAGYKHSARSLTKEELQKKEYKSHLSVLRKNSLRNPVVEKILNQMINVVNQLIDTYGKPDEIRIELSRELKKSQEERASLSDAIRKNTGESDSIRKILQDEFKIQHVTRNDILRYRLYEELKLNGYKTIYSNTYIPREELFSNRFDIEHIIPKARLFDDSFSNKTLERRDINIEKADKTAYEYVADKYDEKWLSEYETRIEELFNQKAISKTKRNHLLMKAADIPTDFLSRELRDSQYIARKAREILEDIVPIVVSTTGAITSRLREDWQLVHIMQELNWNKYDQLGETETYTDKNGETKRIIKNWTKRNDHRHHAMDALTIAFTKPSIIQYLNNLNARSDKGGSIYGIEQKELNRDNKHNKLVFNAPMPLDEFRAEAKKHLESILVSIKAKNKVVTKNVNKTKKKNGIIKTNQITPRGPLHNETVYGKIKNFVAEYKIVNGQFDESTILRVCNQRYRNALLKRLSEYDYNPKKAFTGKNSLEKNPIWLNAEHSYSVPTKIKLFKVVDVFTIRKSIDSNLKIDKVIDKKIREILQQRLDENGKDANKAFSNLNDNPIWLNEEKGIAIKRVKVKAKVSSDTSVPLHIKKDLSGNVINDDEGRVVPTDYVNTASNHHIAIFVDSNGIWQEHVVSFFEATASALLGMPIVDKSYKSEEGWKFLFSMKQNEYFVFPNKETGFNPSEIDLMDESNYPIISQNLYRVQKFSSSYYVFRHHLETNVEEQNILKGTTWKRITSIKHLEGIVKVRVNHIGRIVAIGEY

SEQ ID NO: 23803 - protein, 1413 aa, unidentified
  REGION 1..1413: note = Cas Enzyme sequence
MKEKVVGIDLGTGSLGISVRNLSLGESLEKQLEWFSVTTFESGTSSDQTGEHTLAADRRSHVQSRRLKEHSRWKRWSTLSLLIDYNMCPMSRQSLERWCTYDKSRGLKREFPVDDDAFMRWLRMDFDGDGKSDLTAFQLRRKLVEEQFDFTKPINRYKLGRAIYHIAQHRGFKSSKGETLSGQEEDVKDVQVNADNLEETMKKSEERKSKDLSEYMAKHGFKTVGQAFASLEDAGIRVRNSRYQAVRSQNVAEVDEYFHFQEGLREYEDLHKRLVSTKKGEGTLFYKLPLRSQKGHIGKCTFEKNKRRCPISHPEYEKYRAWGFINNIKYRECANGCWQELPLELKKLLYQKVFTAYVRKDFPFEKIREFLEKQLGMTFKNVEGIKTINYKDKTLVAGCPVTARLQNIAAIFDTNIEQLHLQSTKTRLSHSVKNTEKHAVTYNAEDLWHFCFEADEIEDVKRFARSSLGWEDMATDALCKLWASIEQGYAPLSLKVLKNINRMLEYGLKTSDAIFLAKVPDITGIEESSIPQLIELYEKDVKAPVDRSLRLGRIVNTLISKYKSLAPRDRFADHDFGYQLQQDDKDDIVQCIMDNDSLFTLMDATEQQQMINEVTRLYQSFFADIHRDYVKTPKLADTLAEKLKEKFPAVDESKWKLLYHPSMVSDFHRNKEDEGLLGSPRIGAIRNPTVLRALNVLRKTLNTMILDGLIDPQETRLVVETTRVNNDINKHWAIEKYNNERRDANKAIWNILKEYYPNKDIKDKDVDAARYVLEQSGEDIYTDDKPDDLHYRNQIKKYKLWLEQGCCCLYTGRVISLSNMLSENYCDLEHTIPRSLSFDSSDKNLTICDAYYNRHIKQNRIPTQLPNYEHDVTIDGQVYTAIKPRLKNWEEKVERLSQNVLFWKNRARRARTEDSKNACIRQKLLWQMEFDYWRQKLDRFKMKPENLTDGFRNSQLVDTGIITRYAVLYLKTLFSSVDVQNGQSTSAFRKIFGIPQKDRSSNYHHAVDATILAMIPQSAKRDRMLKLFYQIDELKRDCHDVSGLQFQLNKELEDCDLGRGLASIDDFIARQVMVDYYKQDRTLQKNVRPVIRKGKPLMNKTATGKSEPVTFCSDSIRGELHKQTFFGAIRRREDQKTLFVVREPLKYKTSNKDSGFKDWKELNDRLVDLNFKDKSSDLKPMVKMMMDQFPKGTSFKDACEQGIYMLDKDGRKVNRIRHIRCYGKNVTNPMKVKRHAYPSDKEYKQYVWAALADGSVYALCEYVNGSSKVYKRYTYMDISENRKMGLEDIPVCLTDKNGKQFNLRRKICKGDMLLIYRDAPEELLHLDRAELSKRLYKVQSFERKNDIILRHHLLSTGETNSDDGKEKKRDRGESIKDFAKLPNIIRSSITSFKFLQKNVDYIFNKEGLRLMTI

SEQ ID NO: 23804 - protein, 1037 aa, unidentified
  REGION 1..1037: note = Cas Enzyme sequence
TQSDLLTYLGIKKKEQSKFRWNYVADKHYPMNATRHAILNRMKDSEELSRDMEQAIWHLLYSTTSKAEIDKSLSPSDNPKGIFKKLIETGISVESIEKIKTIKLPDEGYGGYSEKAIKKLLPLMRCGEFWDERNIHPATLKRIKEYQTGNCMDDFSERVKQLMSTMIDIHSYQRLPEWLACYVVYGKHSEANDIVKWKTPDDINIYLNNFKQHSLRNPIVESVILETLRVVRDIWKRYGNMDEIHIEMGRDLKNPSDKRAQITQRVLQNENTNIRIKTLLAEFLAEEYKIDNVRPHSPSQQDLLRIYEEDVLAHNEPDEEIQNIINNLSNPTKQPSRTQVLRYKCWLDQKYCSPYTGQPIPLSRLFTSDYEIEHIIPQSRYFDDSFSNKVICESEVNKLKDNQLGYEFIKRHHGQTVQIASGRMVRVLEVDQYEQLVKNIFAQNKRRKLLMDDIPAEFIQRQLNDSRYISKVVKGLLSNIVRTTDEDGNLEREAISKNVITCNGSVTTRLKRDWGLAEVWNAIVLPRFQRLNKITGRDCFTALNSHHQEIPAMPLELQKGFSIKRIDHRHHALDAIVIACTTRDHVNLLNNESALPENQANKHALSHKLRHCEEVVINGKKRTVYKEFLMPWNAFKSDTFNSLQEIVVSFKQNLRVLTQATNLYTKYMDDEKKQQAQHSPDHFAIRKSLHKDTVFGHVNLQRITTVKLKDALKNVNRIVDKRLKKKIKELVCKHYNEKQLLVYFKDYAYEWKGYDFNKVKVFYYTDEKEMMVATRFCNDLVSVFSGKTKKQDIEKTIEQITDTGIQRILTNYLNANLEQIEYAFSADGLEKMNENIATYNNGKQHKPIFKVRLFQPKGNKFQVGQTGNNSKKFVVADAGTNLFFAVYQTSDGNRKFKTIPLEEVLARMKMRLHPVNETDEEGNTLLFSISPNDMVYLPTPDELSDGHINKENIDANRVYRFVDSSGTTANFVPSKIANVIYHLKKDQAELFCQGDTIQDELGKGSPQSKNQKAITGEMVKDLCVPLIVSRIGEIKIK

SEQ ID NO: 23805 - protein, 927 aa, unidentified
  REGION 1..927: note = Cas Enzyme sequence
MRLGKYWNEESIESTTRDRIQSIIERLGTINFDTKKIDDITDDDIPKQVLKSFIANRENPFSGLNTYQACYAVYNRHSEASEITKWKTPKDIEKYLEEFKQHSLRNPIVEQVVTETLRVVKDIWELYGEGREDFFSEIHIELGREMKNPAEKRKQLTQRNSENENTNQRIKALLQELKNDINVKSEVKPYSPSQQEILKIYEEGVFQNSPEEYKFIKLEEVEKIRSNNSPSRSEISRYKLWLEQGYISPYTGKPIPLSKLFSTEYQIEHIIPQSRYFDNSLNNKIICESEINELKDNKTAFAFITEEKGRIVELIENKTVKLFTVEEYEIHCNNYFKKNRSKLKNLLSEDIPEGFINRQLNDSRYISKLIKGLLSNIVREENEEEATSKHIVPVTGAITSQLKKDWGLNDKWNEIVAPRFIRLNEMTNSRDFGFWDKTINAFRTQVPDEIARGFNKKRIDHRHHALDALVIACTTKDHISYITSLNTQRKNYGLIDKLRVRKEIQIKNKYTGETIIKKVASDYHKPWPNFTINAKEALEQTLISFKQNTRVITKANNKTWQWVHKNGILKKELVAQTKGDNRAIRKSLHEATVYGKVIIKREKGIVSIAKALENWEMIVDSTIKEIVKEKVKFYKTDTKLLKKYFKDTPIIINGKKIEKIRVFEKVMASASRFALTNKLTRKQLERITDSGIQMILENHLKNYIDKKGKEHLELAFDPDGIDELNKNIVALNNGKFHHPIYKVRLYEVGKKFAVGYTGNKKDKYVETAQGTNLFFAIYQDPESKKRSYETIPLNVAIERKKQGLNVAPERDENNNILLFTLSPNDLVYVPNEEEQEQPDLLNIKNLTKEQVERVFKIVSSTGNRLHSIPNNISKPIFNKNEFSILNKLEFDLQGNSIKENCWKLKVDRLGNIKQVANSLNIQSNAIV

SEQ ID NO: 23806 - protein, 1357 aa, unidentified
  REGION 1..1357: note = Cas Enzyme sequence
MEKILGIDLGTNSVGWAIRDISKKENQIIDKGVLTFDKGVGEEQGKEVPLVKQRTEARSRRRNYQAKRYRKWLMLKTLIYSNPKMCPLSIEELDAWRKYKKDDGRIYPTSKEFISWLRLDFDGDRKPDFKNPYELRKMASEKKITNPLIVGRVFYNLVQRRGFRGRDDEEAKTILKGSTEKGTKGAEEIHNVIEKENTTLGAELYKINESEGERIRNRYNLRKDFEKELETICIVQGILIESELYKNLHKSIIWQRPLRTQKGNIGRCTLEPSKPRCPISHPLFEEFRARSFINNIKIRDKNDDESEYKQLDEEQRNLVFEKLFFRKSKPYFDFIDIIKLLNKNGNEYDFNYAKNQSNQKKTNVLVSGCPVTTELASLFECDLSEIKIFHPPKRDRKTQKDFYNYQDLWHVLFTFDSKDKLYEFAKENLNLDDDRAERFSKIKLQQGYANLSLHVIKKIIPFLRKGYLYNEAVYLANIHKVFNEELTDEKLKEIIRFINEIKRSHSLDKSSRAIANKLISEYLDSDKDYGRDPEYVIQEKDHIKVLEATQKYFGKNSWEERSEEERNYILDRIKSKYFDFLQSPPIRDLRLIFGEEEKIFDKIKKELKKKHHLSDTEVDQLYHHSVVEDYPEALERNGKKILGDPMPISKGFKNPMALKTLHKMKNLINYLLLNDKIDYDTRVVVEIARELTDANRRRAYKTWISRLQERNFEVSEKIKEMAEKENINIDPSNETNIVKYKLWEEQKYRCLYTGKQITFSDLFNGNLIDIEHTIPASISFNNELSNLTVCYKRYNTDIKGKKIPYQLPNYEERSINIKINEEEIECTPIKPRLKAWEEKVDQLKTNLKNNQKRTKNPSLTKEQKDNLIYQRRLIEFELDYWKKKLDTFYIKEYKQTWRNSQLIDTQIVTKYARPYLKTVFNKVEVQKGNVVSEFRKIFNIDFEKDRSKHTHHAIDAAVLTLIPSHQQRDKILEEHFAARERNLKFHTKPNHWKGFTPNYIKEIENTTLVNYQKDDRTLSAAKKYVRKRGKIQYVKNNDGSFKLDKNGMKIPWIAMGDSVRGQLHEESFLGAIKSSIHREDGLTFVARVPISSFSSLDDFTKIIDLKVREIITETVRSRMEAGNSFNEAMEKPIWFVDKKGIPKKIDKNNKKVQPIRHVRCLVKAGRGTLTEKKAIELKQPAYLSKYDYKNFVYVKNEENKLCLLYEDFIGGEIKRQFELISLYDIADLKLRSYSEIFNLDEFKFSEKNGVKLPLVHIIKAGDRVILYKDLPNELLELSQNDLLSRLYVVYKFNEAPSKYIYLQSHFEARPDSELGVGSTTVDLSIYQPRLKLVAQKFTAIIEKRDFEITLDGEINFK

SEQ ID NO: 23807 - protein, 1458 aa, unidentified
  REGION 1..1458: note = Cas Enzyme sequence
MSESKTILGLDLGTNSIGWALVKQNFENKQGEILGLGSRIIPMTQDVMGNFEAGGSHSQTANRTQARSTRKLYQRDNLRRERLHRVLNVLDFLPEHYKNQIDFISNKGQFVNHTEPLLSSYKDENGKNQFLFVDSFNEMVEEFKKTQPQLFNDEKKIQYDWTIYYLQKKALTQKISKQELAWLILHFNQKRGYYQLSEQDENNDTAENKEKEFVSLKVDRIENSGETLKKTDEKLYNVYFSNGWKYDRMITKPIDWENKTKDFIISKTITKNGEEKITYKAVDAEKDWIAIKKKTEQEIEKSKKTTGQFIFDTLLENPTQKVRGKLVKTIERKYYKSELEKILKTQIEFHPELKSKELYESCCLELYPNNEAHRTSILNRDFLYLFLQDIIFYQRPLKTKTHLISDCELEYRVRFDTQEKVKLKCIAKSNPIFQEFRLWQFIANLRILEKEKGSKGEDVDVTGDYLDTEEKWVELFEFLDEKEEITQKQLLAKFKLKEDKFRWNFPEDKTYPCNETKAKFINRLKRIEGLKDFSFNKEQIQILWHLLYSVTDPEEREKALKKYAEKNDLNDDFAKSFAKMPPYKKDYGSYSEKAIKKLLPLMRRGKYWTENEIPKQAFERINDIENRLNSIENNLDAIETIADDVISKAVLRSFIKTKGRLDALNTYQASYLVYGIHSESKDTEKWESSIDIQNYLNNEFKQHSLRNPIVEQVLTETLRVVKDIWDEFGNGERGFFDEIHVELGREMKNDANTRKRISDKVTENENTNQRVKAILTELMNDGIDVRPYSPSQQEILKIYEEGRYQSENDKEKLVEIDKFRKNNSPTKSDIEKYKLWLGQGYISPYTGKPIMLSELFSPKYQIEHIFPQSRFFDDSMSNKIICEAEVNQLKDNLTAFEFIEKFGGTSVQISGGKYVEIFKTDEYQNHVLYYFAKNKTKRENLLSKDIPEKFLNRQLNDSRYISKVVKGLLSKIVREEGEVEATSKNITTISGSITSQMKQDWGLNDVWNDIITPRFVRMNELTNSSEFGYINPNTNKFLPKVPDELAKGFSKKRIDHRHHALDALVIACTTKDHVNYITSINTERKNHSLISKLRKVEEIEKTITNLDGSTKIDKRKVAKDYLKPWETFTQDVRNQLEKTIVSFKQNTRVINKTKNKFLKWVNTENGKIEKQLVPQIKGQNWAIRKSLHKATIYGKVTLTREGKTFEATAGRITLSDSFTRKQLDKITDTGIQKILNNHVKNYDENFSDAFSPEGIEALNANIQSLNDGKPHQPIYAVRVYEVGNKFPVGTRGSKSSKFVEADKGTNLFFAIYKGKNKKGEEVRTFESIPLNVAIEEMKQGGSPAKPFYFDKNKNEFKLLFTLSPNDLVYVPTKDEIENPSLVDFKKLSKSQVERIYKMVSSTGIQCFFIRNEVANSVKDKYEFSALNKTEKDLNGGMVKALCWKLKVNRIGQIEQGIY

SEQ ID NO: 23808 - protein, 1566 aa, unidentified
  REGION 1..1566: note = Cas Enzyme sequence
MKKILGLDLGTNSIGWALVEQDFKKKEGQIDGLGSRIIPMSQDVLGKFDSGVSISQTAERTGYRGVRRLYDRDHTRRERLHRILNILDFLPSHYATTIDFDKRPGQFKEGLETKLNYILKPRPKNKDDKDEFIFISSFLEMAREFEANGHSGKIPYDWTLYYLRKKALAQAVSKEELAWIILNFNQKRGYYQARGEEADDNPDKLEEFHELKVVKVEADEVSKGKDIWYNVILENGWIYRRKSKESLDSWVGKDKEFIVTTNLEKDGSFKKDKDGEVKRSFRAVDSEKDWIAIKAKSEQDIERSGKTVGVFIYDTLLENPKQKIRGKLVKTIERKFYKDELKRILETQAQKHPEFKDRELYDQCVQELYPRNESHQANIKDRDLVYLLMVDIIFYQRPLKSKKSSIANCQYEFRTYKDKDGNEQIEYKKGIPRSHPLFQEFRLWQFLKNLKIKLKDGKTATDVDVTDTFFATEDDWVNLFDFLSVRKEVEQKDVIKYLVDTKLIEKKEKNQYRWNYVEDRPYPCGETRAQFLTRLKKIDGLNTSEFLTPEVEYHLWHIIYSVKDPKEFKSALGKFARKYEAIGEGAEKAFVDAFGKIPPYPNDYGSYSEKALKKIVPLMRRGRYWNEEVVCYDAKERIDSIMERLSSIDFNRDKIDQNVVDDEFPKQLLKSFIDFKDANPLQGLNTYQSCYAVYARHSEASSVVQWKTTADIDNYLFEFKQHSLRNPIVEQVVTETLRVVRDIWDYYGEKCMAPYTEYKDPKSGKVKKYYHRIFDEIHVELGRAMKNPKKKREQMTLRNLENQNRNERVKRLLTELMNDSTIKGDVRPYSPSHQEILKIYEEGVYQNLDNVDDDIEKIRKSTSPTPTEINRYKLWLEQGYISPYTGKTIPLSRLFTTDYQIEHIIPQSRYFDDSLSNKVICESAVNGLKDNSLAYEFIRDHHGEIVELGNGESVKVLELDAYKSLCAKYFRNNRGKLKKLLSEDIPEGFIERQLNDSRYISKLVKGLLSNVVREENELEATSKHIVTVTGAITSQLKQDWGLNDKWNELVAPRFKRLNELTGTNDYGYWDEKINAFRTQVPDSVSKGFSKKRIDHRHHALDALIVACTTKDHVSYITSLNTARHNHALVGKLRVQEDIEWVNKKTGEITKRTVARAYHQPWSHFTADAYNKLSTTVVSFKQNLRVINKTNNKYLSYKDEKGKLRVDRNGKPQKALTKQVKGDNWAIRKPLHKETVSGKVVLTREKATPITFSNALNNWKSIVNKDVRTLVKVAMTLHGNDLKKVKTYFKSNPIIIENKTINKVKVFETFEATAVRTELSDKFTRKHLESITDTGIQTILENHLKNYVDENGKERFDLAFNQDGIEDMNRNIVALNNGRPHQPIKKVRIYEVGSKFSVGQSGNKKDKYVEAAKGTNLFFAVYWNEEKQKREYDSIPLNVVIEHQKQVAHLPKDERTPIPADPEKGKFLFSLSPNDLVYVPTEDEMENPALVDFNTLSNEQVERVYKMVSSSGSQCFFIRNDVASSIANKYEYSTLNKMEKSIANQMIKSLCWKIQVSTLGNVTNVNR

SEQ ID NO: 23809 - protein, 1576 aa, unidentified
  REGION 1..1576: note = Cas Enzyme sequence
MNKRILGLDLGTNSIGWAMIETDFEKKEGSIKGLGSRIIPMSQEILGKFDSGVTISQTAKRTEYRSVRRLLQRNLLRRERLHRVLNVLGFLPEHFANSIDFEKHFGQFKDNKEVKLNYRKNEEGKHEFIFIDSFNEMVKEFEAKGQKIKIPYDWTLYYLRKKALKQKITKEELAWVILNFNQKRGYYQLRGEEQEVEEDKKVEFITLKGDKVVDTGETLKKTGDKLYTLFFTNGWEYAKPVSSLDKWLNKEHEFIVTSTIKKDGETKRTFKAVDSEKDWIAIKTKTEQDIENSDKTVGEFIYETLLENFSQKIRGKLVKTIERKFYKKEFEQILKTQIKYHSILDVNTKEGAKFYKACVEELYLRNESHQNNIKDKGFEYLFKDDIIFYQRPLKSKKSTISGCQYESRKFKIEVTDKVTDKKRMEWVVAPLKVIPKSHPLFQEFRLWQFLKNLKIYQIKNDDGNLIDKNITETLLKTEDDWVELFDFLNEKAKIKQSQIIDFLVKTKKIEKKNKDNYRWNYVEDKEYPCNETKAQFITRLKKVKDLNVTEFLTTAIEYKLWHIVYSVTDKHEFEEAIKNFAKKNNLDQESFEKNFLKIPPYKSDFGAYSEKAIKKLLTLMRRGKYWDESEIKEEVKDRIEHIMERVNALNLPQNPTKKQLLEALNKRQVADDDIPLQLIKSFIPFINVNPLTALNTYQACYAIYNRHSEAGDIQIWRTPNDIDQYLLEFKQHSLRNPIVEQVVTETLRTVRDIWKYYGKSDERFFDQIHIELGREIKNTADKRKKMTSQITENENTNQRIKSILQELQDNGVSEVKPYSPSQQEILKIYESGIYENPEAKFTNLSEDDIIKIRKNQSPTKSDIKKYKIWLEQGYISPYTGATIPLSKLFSADYQIEHIIPQSRYFDNSMSNKVICESAVNQLKDNQTAFEFIKSHGTQKVDLGMGKNVVIYTVEQYENHCNHYFKKNRTKLKNLLSEEIPEGFINRQLNDSRYISTFIKGLLSNIVREENEKEATSKHVVPVTGSITSKLKQDWGLNEKWNELVQPRFERLNKLITKEGEDLSTDFGYWDYQKDENGKNVGKQFFRTQVPDEISKGFNKKRIDHRHHALDALVIACCTKKHTHYLGSLNSEKENYSLRDTLLIKNDKGDYTKHFKMPWNGFTNDSKKQLEKTVISFKQNTRIINKTNNRTLQWVEKEGQWKKQLVPQIKGDNWSIRKSMHKETVSGKVLLKREKGYVNFNSALGNWKMIVDKSIKSKVKGAFNLFDNDVKKVKNHFKENPIIIDDKEVNKVLIYENIEVTATRKLLDTSFNEKAIEKITDSGIQFILKNHLKQDIYQNQLDEKGKLIEPATLAFSPEGIDRMNKNIKTLNNGKSHQPICKLRVYEAGSKFSISENKESTKNKKYVEAAKGTNLFFAIYINDEGERVYETIPLNEVIEHQKQVAHLPKNERLPIPTKKVTTMRGKEVSIQFLFSLSPNDLIYVPNDEEIGNPNLVDVSNLTKDQVGRIYKMVSSTGSECHFILNSVSSLIKKYDSKSQKGEFGSLNKSEKTLDGLIIKSICWKLNVNRLGQVVSLYS

SEQ ID NO: 23810 - protein, 1452 aa, unidentified
  REGION 1..1452: note = Cas Enzyme sequence
MGKKILGLDLGTTSIGWALVNEAENDNEKSSIIKLGVRLNPLTVDEQQNFKKGKSITTNANRTLKRSMRRNLQRYKLRRENLIEILKEHKIILEETNLSENGNYSTFDTHRLRAKAASEKILLEQFARVLLMINKKRGYKSSRKAKGTEEGALIDGMEIAKKLYNENLTPGQFCLQLLNNGEKYLPDFYRSDLQEEFDKIWYKQKEFYPDILTDELKEKLHNKNEKTTWAILQEPLKLIGVKRTTKGEAQKKENFEWRVKALSEKIDLESLAIGLQKINSQINSSSGYLGEISDRSKELYFNKQTVGQYQMSVLDKNPNASLRNMVFYRQDYLDEFNTIWDEQAKYHEELTQELKKEIRDVIIFFQRRLKSKNGLISFCEFENRKIEIEKNGKKITKIIGSRVIPRSSPLFQEFRIWQKLNDIEIFPISEKNKKTKPNARTLELKEKNILFSELSIKEKLSKTEILALLDLQDFEINFNSIEGNKTQAELFKAYQKIIGLSGYEINSRQSTEKILTEVSEIFKTLNYNEDILHPNTETLYKFWHLLYSFEGDKSITGNEKLINKLKNDYGFEKKAAVILAGVAFESDYGNLSAKAIKKILPHLKTGEKYDVACALAGYRHSASSLTKEEIENKIYKNRLDILPKNHLRNPVVEKILNQMINVVNTIIDTYGKPDEIRIELARELKKSAKEREGLTKEIDDTTKKNEEIKTKLQKEFGLTNVTQNDIIRYKLYEELKNNGYRTLYSDTYIPQEKLFSKEFDIEHIIPQSRLFDDSFSNKTLEVRSINIEKGNQTAFDYVKGKGYDNLNVFLNRIISVYGKKNEKDFDYYKKEYENSLMKKETREKWNKLTEVEKKIQVINKYYSGKLKKLIITSEDIPEDFINRDLSDTRYIAKYAKTMLGNLVKNVVSTSGSITKRLREDWQLVDVMKELNWDKYEAVQLTEEFTNRDGKIVKQIKDWTKRNDHRHHAVDALTVAFTKRQYVQYLNNLNARSDKNSVIYGIEQKELYRDDKGKLLFKPPLKIKEFRAEAKKHLENTLVSIKAKNKVATKNINITKKKNSINKKVQLTPRGQLHLETVYGSQKQYTVKLEKIGTTFDEAKIKTVCKPAYKNALLKHLQENRNDPKKAFGQKNTLTKYPIYIDEAKNLTVPEKVKTKKFETVYTIRKELSPDLFKDAKKKDIFEKALGEATNLSEREIDKAYDKAIEFIFDKGIRKILIERYKKTKLEIEEYNKRVEKKEQKKVLETAFSNLSENPIINKNGKSIKRVTISGISNVQALHTKKDHNGKLILDENCKTHPVDFVNTGSNHHVAIFRDKEGNLQENVVSFYEAVTRRNLGLPIIDEEFNIKEGWQFLFSMKQNEYFVFPNEKNGFSPKDIDLLNPDNYSLISPNLFRVQKISTKNYMFRHHLETSVSENKLLRKVAWELIQTPNKLKGIIKVRLNHIGQIVYVGEY

SEQ ID NO: 23811 - protein, 1024 aa, unidentified
  REGION 1..1024: note = Cas Enzyme sequence
IWQTISNIRILEKKHQSSSGKTELDKDVSDQFLTKDSLESIFDLFDKKEKVRQKDILQLLKLDIKEFTVNLYNLNPDKELPGNETKSLIIKFFKKAHLVELGESVIADSTKLFDIWHLLYSVDDRNNIRQTLLRWFQISEESADILASIPAFKQAYASLSNKAINKLLPLMRIGKYWSWEAIHASTKYRLEKILHAEFDENISDQVRQLFLRHQLENHEDFQGLNTPMAAYAVYGLHSEKTISSYDRPDQVVPKEPLNLRNPLVEQVVNETLRLVRDIWKTYGRPFEIHIELARELKKNRKEREEMTKMMYENEQENARIAAILRELKLGNPNSLSDIERLKLWERQGGETARLSMQEVKFKRPAEPTPSEIERYKLWAQQQFISPYSGQPIPISKLFTRDYDIDHIIPRSRFFDDSLENKVVVESFLNKEKGNTTAMEYIKKGSAMGFVLLNEKEFEEHTLKFFFRKKRKLLLSEDVPDQFINRQLVDTRYIGRKITELLAPVSENQQDPIIVSNGTITHELKANWGLSEVMKELVKWRFEHLEQKTGKKYAWYDQETDTEGKPTGRKVLRLKGYEKRIDHRHHALDALVVACTTRSHIKYLNDLNKLRENGNGFDSEIKTQLPLLLLPGKDKHLQSRKFKMPWDKFRQDSRDALSSIIVSFRNRIRIMGKKANRNQKIVLQPDGSMKKQIVFSKDSGGNKKLSPYVRQSLHKATIWGQIKRREYKDVNFTDAFRNIDLIADKDQKKYFRTLLEQSAGEIKKAVKSYKDAPYTDSNGNLLQKVAVVEFKHYATSRVDISTGFDLKRIEKIPDPVLKDKLREHLSAMEEGNKEKNKESQIDPFGPEGIQILNSGLRFPIKKVTTIEDQGSKFPIRPGAYTEADKGTNLYFVIYENLNDPSDRQFASIPLRDVVEAKAAGEGFVEEKPGYRLFLLSPNDLVYIPDEGEKMNPSNLNLDSSKVYKMVSCTGRQCFFVMNTIAKVIIDKVELGSINKEEKGQDGRMIKQFCYKIEIDRLGGIKSKNK

SEQ ID NO: 23812 - protein, 1073 aa, unidentified
  REGION 1..1073: note = Cas Enzyme sequence
MSDTKNGGYILGLDIGVNSIGWAILKADENLNPTSIEDAGARVFEAGVEGDIESGKDESRNLKRRDARSIRKRLDRNARRLNEVFYRLQTAELLPKSNTKGNQTGEEKQRVLKAKTRHEIIISLDNELMKMWCEKLQTGGATKDDLRLFHLKFPYFLRARALDEKLEPFELGRAIYHLAQRRGFLSNRKALKKEDEKKGEVKKGIDELSQFMRDTNSRTLGEYFSKINPEDRRIRQRWTSRAMYLEEFEKIWAAQKSHHPSVLTDEFKEEIEDAIFYQRPLKIQKHLIGKCELETNPPRPRAPMAILDTQRFRMLQMVNNTRVIPEYGELRDLEPTERNALVDLLQTNGDTGFKEAKKKLGLSNKSVFNFEEGGEKRFLGNRTAAKLEEVFGEKRWKEFTEDEKNRIVEDWLSIQKEETLRRRGKEVWGLDDESAKKFGELELEQGYARFSKAAINKLLPLMEKGARTNHAIYEVYDPPIPEPDEFLPMITQKLMPELRNPTVSRSLTELRKVVNAVLREYGKPVKIRVELARDLKKSRKQRKELSDKMRQNQKAREEAAASIMKEAGITQPKSGDIQKYLLAVECNWTCPYTSKSITPKALFGDHPQFDIEHIIPFSRCLDDSFMNKTLCDHNENVHGKKQRTPFEAYSADPEKWNEILLRVQKFQGEAMRAKLRRFKLESKTEDAEKIFEDFATNQLNDTRYASKLAKKYLGLLYGEEAKSRIQIGRGATTAFLRNEWKLNKILNDGGEKKRDDHRHHAVDAVAIALTGPKTVKMLSDAAYRAVKEGRRWFANVQPPWDGFFEDACKVINSIIVSHRVSRKVNGPLHEETFYSPPKKDRDGKEYHSARKSLDALSKDDVDNIIDDTVREKVKSKLAEFGGGEPKKVFASPENHPHLDAKDGRKIPIHRVRVKKSVSPFKIGKGLTERYVTTDANHHVEIVEILDKKRNSKWEGHIVTQFEAIQRHRKGEPVIKTNHNDGKKFLFSLAGGEVIEIDEGNGKRGLYIIRTIAKMKQGKNEYVNLAFVPLNDARMKKEIIAKKEWRTSLIDPLRKLNCRKVSITPLGEVRRAND

SEQ ID NO: 23813 - protein, 1512 aa, unidentified
  REGION 1..1512: note = Cas Enzyme sequence
MKKILGLDIGTNSIGWAFIESNAYENPEALDGKIIQLGSRIIPMDADSLNKFEAGNPVSKAAGRRQARGARRLNQRYKLRRTRLIEAFKILGWVPKEFPVNFKKLNKHNINKYLPYSNSLKNEVAEFFGTAGKRTIKGEECEISEDWIIYFLKAKALNTQVSLPELARILYHYNQRRGFKSSRKDNKFEDDATEVKYPLYEKWVEIVTVTSITEKNKGEGKDSDYIFYEFTCKTTDLEFTAIKKRKNPLDWLNKNIEVEITKKTTKDQKITYTITEVDQNAWESRKKAWEKFLIAEGKHISETYLNELRKDRNFKIKQRIFDRKFYQDELKAIWKKQSKFYQNEFEDKNNISEIADSFYTHNTEKNKEIKGKDLFHIFFNDIIYYQRGLKSQKGLLASCQYETKAYKTKSGEIKIVGIQVTSKSSPTFQEFRIWQTIHNLKIIKKEEILNNKLKINIDVSVKYLTTENKERLFELFDSSIEVTHDSILRLFGFKKDIIENGEKTFEYKLNYPEDNFTGNETKGLFRKIFKKNGFVEEGEKYLNNKELFNHLWHIVYSLPEEKEIANALRNPKYFDLPEPLIKSISKMPEFKRQYSSLSTKAINKLLPLMRIGKYWNEFDINILFEKSEKYKDFDKAISDKNIPEILRHEIVKRDLKDIYDFAGLPTFLAAYIIYGRHSESANDTKYEKIDDFKINEIIPHNSLRNPIVEKVIRETLNLVKEIWKDENLGRPDYIHVELGREMKNSNKEREAIYKVNQKNRIERERITALLKELKYPNFNPDSPFDIEKFRLWKETGGNKGEDEFDLLFKNNNSEFIKDADIEKYRHWAEQNYRSPYTGRIIKLSELFSERYQIDHIIPRAKFYDNSFANKVVVEAEVNALKDNRLAIQFIEDSQGREIKLNSGEVTKVLTLEEYKDFADNVFTNKKKKRHLKLYEVPDDFVERQMNDTKYISKTVAQFLLPVANGSDTDAGLVYSSGNITSNLKNKWGLNKLWKEILLPRFVRLESILEEKLVILSDSKKADFHFAKDYKRIDHRHHALDALVVACTSRSHIKYLNSLNSLSNNKKDIANYNEWAKWKYLLNKKKQLENLENGMTEFASPWERFYLDAKDAIESVIVSYKPTTKLISKAINKYYKWVEVEKVDGEKIWEKKIHYQVAPKDDEKYWVAVRQSLFGQPFGKIHIAEYRNNVDFKKALQVQIAFNKREKFEWNSEDWRIAKKDIRKKINNILFKYDNNEQESIKYFAANPLFDDYGNKIDQLDLLHFKKYASKRVNIDETFTPDKIEKMPYSNLKNNWLTTLLREHLKEYNDNPKLAFKGEALEMLHKKSPYPINKVTRKESGTKIEKDNKLLEGDAGVNQYFIIEINKQINKKTGEEKVVRNYYTPNFLDTIERLAKGLPIHDVKPDSQYIILSPGDLVYVPTEEEKNNKIDWNNKKALAERIYVMKSTQTSAAYFLPASVSLLIQPYDPKLKKGEFESMNKSEKTIDRLQVIKENFIKLKVDRLGNISPHILM

SEQ ID NO: 23814 - protein, 1533 aa, unidentified
  REGION 1..1533: note = Cas Enzyme sequence
MKRILGLDLGTNSIGWALTNNDFDNKLGNIAGLGSRIIPMSQDVLGKFDSGVSISQTAERTKYRGTRRLVQRFLLRRERLHRILNILDFLPKHYSEAIDFDKKFGQFKPEREEKLSFYKNENGKNQFLFMESHQEMLSEFKLINPDLKQVPYDWTIYYLRKKALTQKISKEELAWILLNFNQKRGYYQLRGEEKEENKNKLEEFHTLTVVNVIEREKGKSGIWYNVILENGWIYKRESKIALFDWVGKQKNFIVTTELNDDGTIKRNKDNEEKRSFRSPKEDDWGLVKIRTEQTINQSDKAVGTYIYDELVKNPNQKIKGELVRTIERHYYKSELKQILETQIEFHTATLKDRNLYKKCIDELYKHNDSHKTSIKDRGFDYLFLDDIIFYQRPLKSKTALISDCSLEFRPIKDKKGVLVKDINGKQIVKPLKCIAKSNPIFQEFRLLQFVKNLKIFRKDIANDVDVTNDYLKTEEDAAELFNWLNDKAEISQKQFVAYPKFKLKDDKYRWNFVEDKIYPCNETRNQFLNAIAKIDVDKSFFDTKNTQDLWHILYSVTDKTEITKAITTFANRHSLPDGFIVNFSKLKPYKKDYGSYSEKAIKKLLPLMRFGNHWNEKNIDTKTLVRIDKIETGEFDENIKTRVREKALHLNVLSDFKGLPLWLTSYIVYDRHSESSDISKWKTPADIEHFLKHDFKQHSLRNPIVEQVITETLRVVKDIWQYYGEGKENFFNEIHIELGREMKNNAADRKRITDNISQNENTNLRIKAILTELKNDGVNDIRPYSPSQQEILKIYEEGIYSSENNKEKLEEVEKIRRNAKPTTSEIIKYKLWLEQGYISPYTGKLIPLSDLFTTKYQIEHIIPQSRLFDDSLSNKVICESEVNDLKGNKTALEFILKNEDRIVTLTGGKTVKIFTKDAYNQHITNYYSKNKNKQKRLLSEDIPEKFIERQLNDTKYISKIVKNLLSKIVREDDEQEVTSKHIVSLNGSITSRMKQDWGLNDVWNKIVTPRFERLNAITNSTDFGKLEFKKDEFGNTGKQVFQTTVPDAIAKGFSKKRIDHRHHALDALVIACVNRTHINYLNNLNAKDENDKTIKHELRNKICFKTKPDVNGNYKWEFYKPWDNFTKNTEDELNQTIISFKQNTRVINKTVNKYQVWKEEDGAMKKVTTKQTKGDNWAIRKPMHAETVSGKVFLKRIKQSHITIANAIEQIELIVDKEVKKQLVAKIKQYPNNDAGLKKHLKAFPVMIDGKAIDKIQIYETIEATATRKTLDITFDEKRIEKITDTGIQKILLNHLQQEIYQNAIDENGRKIPAHEVAFSENGLDELNKNITALNNGKKHQPIKKVRVFEEGSRFGLGQVGNKSDKYVEAAKGTNLFFAIYQDEKGKRNYKTIPFNEVIERQKQGLCSALEIDENRNRLLFTLSPNDLVYIPTEDEKDNLTHLNFDKISKEQAERICKFVSCTGGEGHFVTHNYSKEIISNENGSNNKNERMLEFNTSNTIYDEKEKPVMIKSVCWKLEVDRLGKIKKLSDDK

SEQ ID NO: 23815 - protein, 1063 aa, unidentified
  REGION 1..1063: note = Cas Enzyme sequence
KQVFYRQDYLDEFEKIWETQSKFHAELTNILKEEIRDVIIFYQRKLKSQKGLISICEFENKTITVLIDGHSKKKIIGPRVVPKSSPVFQEYKIWQVLNNLSFTPKKEAINREKSKEVLSLESKQLIFEELNIRGKLKNTEVLTLLKLNFKDWKCNFETIEGNNTNQAIYNVLQQISENEGYGFEWNKKNAFKIKEELKTTLPLIGVNPSILDFDINFNDFENQLSYQFWHLLYASEDDIKVNKMDEVIYGKNAVSLKKKLHLKFGVPVKYTSLFTNISLQQDYGNLSTKAIRKIIPHLQEGHEYSEACTLAGYNHSNSITSEENLRRVLKEKLELLPKNSLRNPVVEKILNQLVNVVNQIIDTYGKPDEIRIELARELKKSAKERKEMTAGIASATRRNDEIKKILQRPPFNIKNSTKNDVTKYRLYQELEGIGFKTIYTNKYIEPNKLFSKEIDIEHIIPKAKLFDDSFSNKTLAFRDVNLTKSDMTSYDFIEKKYNADLDNYVLRVKSLYDNGKILKGKYLKLLMKESNLPDGFIERDLRNTQYIAKKAKNMLHEAIRNVYATTGSITDKLREDWDLINVMKELNLPKFRKLDLTVIEERKNGNKVEQIRDWTKRNDHRHHAMDALVVAFTTNNHIQYINNLKAKSNKSSPIYAIQQLITSKSENGKRLFTPPMFKFREEAKKHIESILISFKTKNKVVTKNINITKNKKGTLKKVQLTPRGQLHKETIYGKSQREIVKKEKISGVFTIDKINTVTQTEYRSLLTKRLLEFNNDPYKAFGGNNVLTKNPILLKNGKELPLLVTTKSYEDIFTIRKEITPELKLEKIIDLKIREILSNRIQEFNGDKKAAFSNLDANPIWLNQVKGIAIKRVTISGVTNTEALHDKKDHLGKNILDNNVITQPVDYVSTGNNHHVAIYKDDKEKLQEQVVSFFDAVTRVNQGLPVVNKNYNKDKGWGFLFTLKQNELFVFSSDDFNSAEIDLLNKQNYNMISPYLFRVQKISTKNYLFTHHLETKATSGEDLKSKKALSGITYHFIQSTEPLRNIVKVRISHLGEIVHVGEY

SEQ ID NO: 23816 - protein, 1397 aa, unidentified
  REGION 1..1397: note = Cas Enzyme sequence
YDWTIYYLRKKALTFPIAKAELAWLLFHFNQKRGYYQLRGEEEEENKNKLVEFYELKVVDVLDSGDKKSKDEIWYNVILENGWIYRRTSRIPLDWIGKTKEFIVTTDINDDGSIKTDKDGKEKRSFRSPGADDWTLVKKKTEAEIERSKHTVGTYIYDTLLKCPGQKIKGKLVRTIERKFYRDELRLILEKQQTFHPELQDRKNYSICLEELYRNNQDHRIAFGQKDFAHLFMNDIIFYQRPLKSKKSEISECRYESRRYLDKEGIMQSESLKCIAKSHPLFQEFRLWQFLQNLNIYQHEKYIEGRLYTDINVTAEFLKSEDDWVALFDFLNDRKEIDQKSFLKYPRFNLKKNAEKYRWNYVEDKTYPANETRSQILAKLKASNIPAEFLTKDIEERLWHILSSVEDKIEIEKAITTFAEKHSLPKEFVENFRKFIPFKKEYGAYSPKAIKKLLPLMRRGKYWSEESITNETKSRISAIVERLDTIGYDKIRINNIADDDIPKQILKSFIDCRNPLTSLNTYQACYAIYGRHSEEGEVIKWELPSDIEYFLKNTFKQHSLRNPIVEQITTETLRVVADIWKKYGNGHKDYFDEIHIELGREMKNTADQRKRITSGVIENENTNLRIKALLSELKNDNSVQNVRPYSPSQQEILKLYEEGALNSVTDIPEEILKISKNAQPSSSELTRYRLWLDQQYRSPYTGEVIPLGKLFTTSYQIEHIIPQSRYFDDSLSNKVICESEVNKDKDNKTAFAYIKECQGKIIELDFGKKVKLFTLDAYEDFVKNRFAKNRTKIKKLLMEDIPDDFINRQMNDSRYISVLIKNLLSNIVREEGEVETTSKNIAACNGSITSILKQDWGLNDVWNELITPRFERMNDLTKSNNFGQWTNKDGKRIFQTDMPLELQKGFTKKRIDHRHHAMDALVIACATRNHINYLNNEHARQKDDKIRFDLRNKLRRIEEVEIDKIEYGQKVRKKIKVAKEFYKPWDTFTQDAKHKLSTIIVSFKQNLRVINKTSNWYQKWKQQDDGNLKKVFFKQDSGDHWAIRKPMHKETVTGLVQLRFKKTVQLSAALDQWEMIVDKSLKNQIKTLVKQGFDKPKLRKFFKELEDKWDGKIISKVEIYYFEKEMVASRSAVNEAYNTNFIKSITDTASQKIMLNHLEKYNEVKDRKIIEHPELAFSPDGLDEMNRNIVQLNDGKFHQPIYKVRSFEPKGNKFNVGTKGNKNKKFVEAAKGTNLFFAIYQNSEEKRSYESIPLNIVIERQKQGLKPVPEINEKGEALVFYLSPNDLIYVPGEDEKNNLQSLNLRNFTQHQTSGIYKMLSSSGTQCFFIRNDIASPIWNKVEFSALNKTERSIDGIMIKDVCWKLKVNRLGQIIEVNGKPVNIEPVKIEESSEGVNL

SEQ ID NO: 23817 - protein, 1103 aa, unidentified
  REGION 1..1103: note = Cas Enzyme sequence
MLNPKLQERLKGFLPLVRVGIDFGEGAGGISVVEGNKILHAETYVDFHQTTLEQRRQLRRGRRTRHAKKMRLARLRSWVLRQKLPDGSRLPDPHDVMRDKRFQVQPGVFETPGQNPAQSPSWIDLAKEGKTEPAGFVKALTLIFQKRGYKWDAIALEEMTDAKLKEFLTTARIPSDELAGEVGAQIERRRSDPDDPVRGKPKVSPDELSELLRLARERGTLPPQPRVAEHRSVKETELRQVIAGLGTSAGLPQETVERWQRELCGGPTGRGREKPGLLNKVLRPARFENRLRTGCAWCGKPTPRKAKVRYIAYAAAVCNLRVREGRRVRPLSPTDQEVFWHWWRLQEAATAQPAQPAAESQADKTPGKAKSETVPKMGGIEGHLKRLGAQKEMARQLYDLLWNPQPKGRASLCKRHLEQAALGKTMKDAGVDWQTISVRKAPNPCREQHDKRVLHRLEQILFKPGKTGDEAWRYGPVQFITLEVPKPQTEQARKGEQKARKVETFTERLNKETGGVCIYCDPAHPRPAEDKDHIFPQSRGGPDVWDNLVPACKPCNTEKGDRTPFEWLGTNPGRWDAFSTRVEDLAHKGVAAPSEDSEKSKVARYLPISERKRALLLSQDSEYPENPTPLAHVGSRPRQFVVELQRLCGKYGVKPPRADYQLGEPFVQRMDGRTTAQLRKSWLKKADETTDNFPLKNEWDLLNHAQDAVLIAACPPHTWRDTIFCHRALRPNREGRWVEQPELAVHELAPDWAEYMERRTWPLLRVLGRYPVSWKRTFADQNFYQRPEKLDDKRLRQHVPLVALKYKPKDPEKKRSASETQILNPYVAAQFPVLAESVLEEREQWQKAHPKPDKAERKKLRELGLTPAHTIAKEKLQAKFPGIRHVKVEKQPGGRLARVEPKDGPPRKIQLKKASEAAVFWLKQGKTLNEKNLVISVRWPSIFQKFHVPRHDPPIPEGATILDVWPRHKLIWLDQATGHEPAFYRVKEFSEAEVTVLPENAVTDELAKRLNLRRERAKKKSPAAAPASEPEEPVATPAAEDEEPEPSARTQEIKLHRKDLVAYFESQRGEDTSESPGDGSSRTGFCGDSRSAKNRRSKIHKPD

SEQ ID NO: 23818 - protein, 1410 aa, unidentified
  REGION 1..1410: note = Cas Enzyme sequence
MEKILGLDLGTNSIGWAIREINSELDNQIIDKGVLTFDKGVAEDKSGEHPMVQKRTESRHKRRNYQAEKYRKWQLLEFLIDSKMCPLTIDNLDEWRRYKKGTGRKYPQSEKFIQWLRFDFNGDGKPDFEQIGFDKHESYYIFRVIAVSEEKKHKEIFEKNPNILGRIFYQLVQRRGFKGRDEEEAQTMLKGSKDSGTKGRNDIAEYIEKYKTLGAALYYLQKEENARIRKRYNLRTDYDAELKEICRVQGLSDDVYKKLWKAIVWQRPLRSQKGLVGICTFEKNKSRCPVSHPLYEEYRTWIFINNLKISVPENVDKASYLKEKIYPLFYNASTDFKLSSILKQLKRDGSVMQANFKDDTKVISSKLLNSFEKLFGENWKNELGWQAALNNQLKPCNYSFEDIWHVLFTFDSTEKLKDFATSKLNLSEENAEKFSKIKLQQGYATLSLSAIKKILPYLYKGFIYSEVIYLANLPKVFGNKNIDESLTNNFETIYRQLRKEHDEEKILNACVNDLIRNELNSDQRYRIEDNRDLDEQENKLIEEKVEEIIGSKSWNKKTEEERASAKSYVSRYFKAFLQKPVHGKKDELFLPMPNLHERIKTHLKNTYEIDDKHLDYLWHPSEQETYPNAKEIKLENAGTIKQLGDPQPISRGFKNPMALKTLHKLKRLLNYLLQTGKIDEDTRVVVEIARELNDANKRKAIEKWQRDREKENEDFKKIIDEINKECATAYDREDKTLIDKIRLWKEQNMMCLYTGKQIKSCDVFIGTKYDIEHSIPASMSFDNELKNLTIADAYYNREIKKKKIPFDCPNYFEEVTINGNVYKPIIKNIEIVFGERKVETKKIRGKEVEFISYERIEHLKEQVDFWKKQTRIASTKKRKDDCIQFRHYNQMELDYWRKKLETFTCEEYKSGWRNSQLKDTQTITKYTLPYLKTVFNKIEVQKARQNRYDNEDGMLNIFKKIYQIKGDENKERAKHSHHAIDAAVLTLIPPAIVRDKILLRYNEAKENKLRYHEKPRQWNNFHQRFIIGIEEDILINYQAQHRTLTQTYKNVRKRGKQQFVKYKDTNGKWHFKLDEKGNKIPLTAKGDTVRGQLHEESFMTLIKQPEYEFKNNKYYPKTDGNGSFIFQQKDGNDELFVVKKILLSELDSLDKFKKIVDLNLRSYLTTLINNRMQSGKSFQQAISEPIWAFDKTRDKNGNPINPLRHIRCKVSKAAGFLSKEKTLDIRKNEFVSKFSHKRDVLAGNDEMVVCLYFENNGMRNFKLLSRFELAILKIKNVNDLFNNPNYNKTLKGTKKVELPLYHIIQSGMKVILLDEKINTIEELKGLDTISLSKRLFVVNNFNTPAGNTIYIYLVNHIDARQKEVLQKNEEKNIDTSKYQAKLALTADKFFCVIEGKHFEIKPDGEIKWKF

SEQ ID NO: 23819 - protein, 1138 aa, unidentified
  REGION 1..1138: note = Cas Enzyme sequence
GPAFRTRYPAKGKGSWRARPSGERHDILFPVRPAAMLNPKLQERLKGFLPLVRVGIDFGEGAGGISVVEGNKILHAETYVDFHQTTLEQRRQLRRGRRTRHAKKMRLARLRSWVLRQKLPDGSRLPDPHDVMRDKRFQVQPGVFETPGQNPAQSPSWIDLAKEGKTEPAGFVKALTLIFQKRGYKWDAIALEEMTDAKLKEFLTTARIPSDELAGEVGAQIERRRSDPDDPVRGKPKVSPDELSELLRLARERGTLPPQPRVAEHRSVKETELRQVIAGLGTSAGLPQETVERWQRELCGGPTGRGREKPGLLNKVLRPARFENRLRTGCAWCGKPTPRKAKVRYIAYAAAVCNLRVREGRRVRPLSPTDQEVFWHWWRLQEAATAQPAQPAAESQADKTPGKAKSETVPKMGGIEGHLKRLGAQKEMARQLYDLLWNPQPKGRASLCKRHLEQAALGKTMKDAGVDWQTISVRKAPNPCREQHDKRVLHRLEQILFKPGKTGDEAWRYGPVQFITLEVPKPQTEQARKGEQKARKVETFTERLNKETGGVCIYCDPAHPRPAEDKDHIFPQSRGGPDVWDNLVPACKPCNTEKGDRTPFEWLGTNPGRWDAFSTRVEDLAHKGVAAPSEDSEKSKVARYLPISERKRALLLSQDSEYPENPTPLAHVGSRPRQFVVELQRLCGKYGVKPPRADYQLGEPFVQRMDGRTTAQLRKSWLKKADETTDNFPLKNEWDLLNHAQDAVLIAACPPHTWRDTIFCHRALRPNREGRWVEQPELAVHELAPDWAEYMERRTWPLLRVLGRYPVSWKRTFADQNFYQRPEKLDDKRLRQHVPLVALKYKPKDPEKKRSASETQILNPYVAAQFPVLAESVLEEREQWQKAHPKPDKAERKKLRELGLTPAHTIAKEKLQAKFPGIRHVKVEKQPGGRLARVEPKDGPPRKIQLKKASEAAVFWLKQGKTLNEKNLVISVRWPSIFQKFHVPRHDPPIPEGATILDVWPRHKLIWLDQATGHEPAFYRVKEFSEAEVTVLPENAVTDELAKRLNLRRERAKKKSPAAAPASEPEEPVATPAAEDEEPEPSARTQEIKLHRKDLVAYFESQRGEDTSESPGDGSSRTGFCGDSRSAKNRRSKIHKPD

SEQ ID NO: 23820 - protein, 1235 aa, unidentified
  REGION 1..1235: note = Cas Enzyme sequence
MKKILGLDLGSASIGWAVTSEENSNGEVKREILGLGSRIVPYEGTEGKDFEKGTGESRNSVRTKMRTARKGYDRYQLRRKYLVNELIKNEMYPTEEVKNIPKMELWELRNRAVTSKISLTELGRLLLWLNQKRGYKSSRCEANLDKKDTDYVAEVKSRHQTIKEKSLTIGQYFYQQLSDDEFFRVKENIFPREAYIEEFEAICKQQQKHYPDLITEKFIQKVRDEIIYYQRPLKSQKGLVSICEFEGFWLKGKDDKEYFVGPKVAPRSSPIFQIAKVWENVNSIRIENKYGDKIELSLEEKQAIFNHLDNNENLTQAQIITILKLKKNEYFFNKQIAKGIKGNVTKTAIIKCFEESKNYSHLLKFEYSICEDKLVDKETGEILEDISYRYIDPRIENEPYYQLWHTIYSISDMDVCSRVLQQKFSIEPDVADKLAKLDLTKGGFGNKSAKAIRKILPYLMEGYVYSDAMLFAGYDHSNSLTKPENLQRKLLERLKPIPNNSLRQPIVEKILNQMVNVVNATIDKYGKPDEIRVELARELKQSKEERSDTSRFLSKRERENEQIVKKLEEFGLRATRNNIVKWRLYEEMDNEDKKLNAICIYCGQPISITEAIKGNDVDIEHIIPKSKLFDDSQSNKTLAHRRCNTDKGDRTAYDFMKGKSEQALVAYVDRVNKLFTSKIIGKAKRDKLLMTEDKIPQNFIDRQLRESQYIARKAREILQTICHNVWSTSGTVTAELRHLWGWDDVTMNLQFPRYKELGLTEIREWESEHGKNKHSKEVIVGWSKRDDHRHHAIDALTIACTKQGYIQRFNTLSSSKTRDDMKKDVDRRSIEYREKLNLLEKYLISEQPFTVREVEEKAANILISFKAGKKVAVVGKRKVGRRGNKKVVQEGIIIPRGALSEESVYGKIKKVEAKKPLKYLFENPHLIFKPRIKQLVEERLGKFDGDTKKALTSIKKEPIYLDKEKSTLLEYGSCYSDEYVIKYSIDINFNKVDKVIDGNIKRILQQRLKKFNGKPKEAFKDVQRDEKVLKWYEDEGLERPIRAVRCYTGLSAVVPVRKDANGKEIGFVKPGNNHHIAIYTDAEGKKIEHICTFWHAVERKKYGLPVIISSTNEVWDKIQQSAEGTYPENFLKLLPEPNLTLHLSMQQNEMFVLGMTNEEFEIAKSSNDYRALSDKLYRVQKLGGDDYNFRHHLETELVNDNNAKVSKRFFRVNSIGALDGLNPIKVKINCIGNLV

SEQ ID NO: 23821 - protein, 1096 aa, unidentified
  REGION 1..1096: note = Cas Enzyme sequence
MDKKDTEYVAEVKSRHQTIKDKNLTIGQYFQQHLSNNEFFRVKENIFPREAYIEEYEAICKLQQVHYPDVITNKFIERVRNEIIYYQRPLKSQKGLVSVCEFEGFLCNGKDGKEYFVGPKVAPRSSPIFQIAKVWENVNNIRIENKFGSKKDLTLEEKQALFNHLENNDKLTQTDIIKILGLNKNECFFNKQIANGIKGNVTKMAILSCFDRPEDYKHLIKFDFETIEKNELCYLYDRKTGEILSENKVKFVDPKIENEPYYQLWHTIYSLSDIDECSKVLQKKFNIKPDIADKLAKLDLTKGGFGNKSAKAIRKILPYLMEGFVYSDAMCFAGYDHSNSLTKDENIKRNLLDKLKPIANNTLRQPIVEKILNQMVNVVNAIIEKYGKPDEIRVELARELKQSKEERSDTSRFLSKRERENEQIEKKLQEFGLRATRNNIIKWRLYEEMDNEDKKLNAICIYCGQPISLTEAIKGSDVDIEHIIPKSKLFDDSQSNKTLAHRRCNTDKGDRTAYDFMKGKSEQALAAYVDRVNKLFSSKVIGKAKRDKLLMTEDKIPQNFIDRQLRESQYIARKAREILQTICHNVWSTSGTVTAELRHLWGWDDVTMNLQFPKYKELGLTEIKEWESEHGKNKHAKEVISGWTKRDDHRHHAIDALTIACTKQGYIQRFNTLSSSKTREDMQRDVDSLSAEYREKLNLLEKYIVGEQPFTVEQVEEKAANILVSFKAGKKVAVVGKRKIGKRGNKKVVQTGIIVPRGALSEESVYGKIKKVEEKKPLKYLFENSHLIFKPLIKQLVEERLDKFEGDTKKALASIKKEPIYIDNEKLIPLEYGSCYTDEYVIKYNVDVNFNKADKVIDGNIKRILQARLEKFNGKPKEAFKDVQCNDMILKWYEDEGLDRPIRSVRCHTGLSAVVPARKDEKGKDIGFVKPGNNHHIAIYTDKDGNKVEHICTFWQAVERKKYGLPVIISNTNEVWDTIQQKPEGTFPESFLNLLPEPNLILHLNMQQNEMFVLGMTNEEVENARINNDYRAISDKLFRVQKLGEKYWVFRHHLETQLVDDVNSKQSKRYILLQSLSALFSLNPTKVKINCIGNLV

SEQ ID NO: 23822 - protein, 1077 aa, unidentified
  REGION 1..1077: note = Cas Enzyme sequence
PGDSESQQQLRKTALEKGLKYIIKEQVIYYQRPLKPQTELIGNCRFEKEEKVIPTSHPFFQEYRCWKQINNLFITSKTLVGTKYTYQNRYLTSEEKWAIYEKLQTQKEVGFATVVEILNMDKTKGKLDKEQKDYFLNGLNVKAKLKGCDTFLSFKKELGEYFNDFISQDKQLVEQLWAVIFDVKNHDGSEYDVESKRVYSIVEVLRNYIDEETAKELSLKLAQKIKFPRKYASLSKKAIQNILPLMLPNPQSIPSSVQQRFKNIQTLIETGEINENLNCDLEDYVFDFVKNNPNVLEYGGIMESFAISLVYGKHTAETIKPQIKNYHDIKFEKRNLRNPVVEQLANETMQVIKAIWKQYKFNPEELEIRVELARELKNSAAEREKIWNGQRKSKVINDKAKEILSENGIAITAENILKYRLYEQQKFMSPYTQKKIIPFSKLFDDKEYDVDHIIPKSRYYDDSFSNKVICEKYINEEKSNRTAWEYISQQNSKYKNENGKLEIVSANEFLCHINDNYFGKKKKNLLAEKIPSNPVERQLKDTQYISVAIKSELAKIVGSDNVKTSTGEVTDFLRSRWGLRKLFMNLTESRFKQMELWDLDENGNPETQWVNRYVDENNKNQYEIKNWSKRYDHRHHSIDALVVALTTQSHIHRLNNLNKYYQDELTARKEEFGITVKEGEGILEGFFNLEAKRRDEVLQKIESSRYFEMPFDNLVDQVKSQLETMVVSHKPKDKLGIKTDDFDKNTPDKILKKQIKIRAGLHQETYYGKLNGRDTKRVDISSLSLPDVSKILIDKVLANEIIEHKKQYGSMKEAFTGEGLKAFNDKRIADGKQPAYKVKVWYNKEEKKESGLQRLYENNDKQSVITGDNYLFVVMEKNRKRIFDIASLYDSVSIATDALKDGVNDFKKRIVEDYRIKHKDKPEKVLFTLQQNELVYLPNNIEERDFLLGMSVDEFRDWINIKANKKAFSNRVYKVVMFTGMDCKFIPHSYSNVISVPKELTKEQKDQLKKKYEEKKGIPKNELNFVEFGSYRDCSPYETGEIFVKSLVNKKQKQKPLKIQDSCIKIKIDWLGNIELA

SEQ ID NO: 23823 - protein, 909 aa, unidentified
  REGION 1..909: note = Cas Enzyme sequence
FFNKQIANGIKGNVTKMAILSCFDRPEDYKHLIKFDFETIEKNELCYLYDRKTGEILSENKVKFVDPKIENEPYYQLWHTIYSLSDIDECSKVLQKKFNIKPDIADKLAKLDLTKGGFGNKSAKAIRKILPYLMEGFVYSDAMCFAGYDHSNSLTKDENIKRNLLDKLKPIANNTLRQPIVEKILNQMVNVVNAIIEKYGKPDEIRVELARELKQSKEERSDTSRFLSKRERENEQIEKKLQEFGLRATRNNIIKWRLYEEMDNEDKKLNAICIYCGQPISLTEAIKGSDVDIEHIIPKSKLFDDSQSNKTLAHRRCNTDKGDRTAYDFMKGKSEQALAAYVDRVNKLFSSKVIGKAKRDKLLMTEDKIPQNFIDRQLRESQYIARKAREILQTICHNVWSTSGTVTAELRHLWGWDDVTMNLQFPKYKELGLTEIKEWESEHGKNKHAKEVISGWTKRDDHRHHAIDALTIACTKQGYIQRFNTLSSSKTREDMQRDVDSLSAEYREKLNLLEKYIVGEQPFTVEQVEEKAANILVSFKAGKKVAVVGKRKIGKRGNKKVVQTGIIVPRGALSEESVYGKIKKVEEKKPLKYLFENSHLIFKPLIKQLVEERLDKFEGDTKKALASIKKEPIYIDNEKLIPLEYGSCYTDEYVIKYNVDVNFNKADKVIDGNIKRILQARLEKFNGKPKEAFKDVQCNDMILKWYEDEGLDRPIRSVRCHTGLSAVVPARKDEKGKDIGFVKPGNNHHIAIYTDKDGNKVEHICTFWQAVERKKYGLPVIISNTNEVWDTIQQKPEGTFPESFLNLLPEPNLILHLNMQQNEMFVLGMTNEEVENARINNDYRAISDKLFRVQKLGEKYWVFRHHLETQLVDDVNSKQSKRYILLQSLSALFSLNPTKVKINCIGNLV

SEQ ID NO: 23824 - protein, 917 aa, unidentified
  REGION 1..917: note = Cas Enzyme sequence
ALNYTERLSQKDIFTILGIKPGDGYTGNKQTAKGIQGNLTYAAIAAIIPERKDLLSFELDIVVGEEDAHLVNRSTGEIISTVQKKTVTAGYEKALFFRLWHVIYSISDSDKCIETLMEKFSLTKEQAVALSRLDFRKAGFANKSVRAMRKILPYLMDGYVFSDAMSLAGYNHSASLTNEENLKRQLKEFLPLIKKNSLRQPVVEKILNQMIGVVNTIIREWGRPDEIRVELARELKQSAEERNRTFSALSKREREGEAITKRIETEFRQFGIRATRNNIMKWRLFHEISNDEARLNATCVYCGQPFGITDALRGSSVDVEHIIPRSKLFDDSQANKTLVHRRCNEDKGDRTAFDFMSAKGENVLATYIETVDRLYQSNVIGRRKRDRLLTSSENIPKDFIERQLRETQYIARKSKEILEQICYEVWSTSGQVTEYLRRIWGWNDVLMNLQLPEYRNQGLTEWKEYTDRDGNIRRQEVVKNWSKRDDHRHHSIDALTIACTRQGFIQRINRLNAISNRDEMRESLNGKYDPKKNLLENYIFALKPFSTKQVEEAAAQVLVSFKPGKRVATLSKFKAKGKNLETGIIVPRGPLSEESVYGRVRLMNSQKQPVRYLFEHPDLIFKPYIRVLVEERLESHSRDVKKALASLKRDPIYLDETKTIKLEWGSCYKEEVVKKYPLIDIGPKDTKFIIDGHIRAIVEERLLQYNGNEKKAFEQPLYSDAGCTQEIRSIRLITRRTAVVPIKKDESGREIGFVVPGNNHHLALYNDTEGQRREHLCTFWHAVERKKWGMPAVITQPGVIWDNILQKPDNFPQEFLEKLPLGDWTFEKSLQQNEMFIVGLTMDEVQNGIKSLDYARLSKHLYRIQNLNSTGYKIVLRHHLATTIMHARDMIGISSPLSFEGIKVSISKTGKISMPHD

SEQ ID NO: 23825 - protein, 1548 aa, unidentified
  REGION 1..1548: note = Cas Enzyme sequence
MKNILGLDLGTNSIGWAVVSTNENDTPQKIECMGSRIIPMDAEEMGKFNSGNTISKTANRTAFRGVRRLKERSLLRRERLHRVLNILGFLPEHYAQEIGWNKNEPKTFGKFIENQEPKLAWRPENDHFQFIFMDSFYQMLEEFRQINLNFIQNGRKIPLDWTIYFLRKKALTEKISKEELAWIILNFNQKRGYYQLRGEDDEDGTKTAKTKKVFYTNKINKITDTGKEYKGLKILFVELENGSVGKIFKREIPQWVGLEKNIISTIDIDSEGNEKKDEFGNISQRFAIPTDAEWESEWQLIKLKTQKDLDQSHKTVGTYIYDSLLNNPTQKIRGKLVRTIERKYYREEFEAILTKQSEFHPELKDKKLYKKCISELYPSNENQKNNIQSWSFVDLFIKDILFYQRPLKSKKSLISNCPFESRYSPKGDHFGVKCIAKSHPLFQEFRLWKFIANLKIFEREKEINGKYYTDYEVTSEFLQSEDDYVALFDWLNDKEKITQDSLFGSYFKIKKVKGKEYSYPYRWNYVDDKTKEYPCNETRGKILSKLEKAEIDKSFLTSEKEEQLWHILYSVEDKVELETALNRFAEKNRLNSDFIDSFKKIRSFEKEYGSFSAKAIKKMLPLMRMGKYWSIDAIDSKTIERIEKIIDAEDDENIQIHIREKLKKLQSIYDYKGLQEHLACYIVYNRFSEAKEVTKWETPKELDDFIINFKQNSLRNPIVEQIILETLRTVRDIWIKEGHIDEIHLELGRELRNDKKERERLSKVVSENENTNLRIKAMLMEFKNPNFHIDGVIPHSPTQQEILKIYEEFAVGNLTKEDSEYEFINKISKNANLTSSEILRYKLWLEQKYKSPYTGLIIPLGKLFTEAYQIEHVIPQSRFFDDSFSNKVICESEVNALKDRELGYEFIKNHHGEKVLLTSSNIIIDIVSEDKYIDFVKSQYSYNRSKMKKMLMEDIPDQFIERQLNDTKYISKEIKRLLSNIVRQKLEDGSLEQEATSKNLISVTGSITSQLKQHWGINDKWNELVLPRFERLNEMTGTLDYIAINKEGHKIPKVPFLISKGFSTKRIDHRHHAMDAVVIACTTREHVQYLNNENAKSQKFHLQKGLAKKLRRFEEIEIPLKEKNENGVWTQGKNFKKIEVPKDFYKPWDSFPVDVKNELDKIIVSFKQNLRVIYKTKNLTQKMDESGKKKLVEQTKGEHWSIRKPLHKDTVFGEVNLRKIKEVSLPIAIMNPTSIVNIDLKKKIMELINSGNDLKKIKKYFEENKEIWSDINLSKISIYYFTKNDTNDKYFATRKELGSIFKNNKGTFLEIEKIFKNILKITDTGIQKILLRFLETKDNNPEIAFSPEGIEELNLNIKKYNNGKDHQPILKVRVYEKAEKFSVGQTGNKKEKFVEAADGTNLFFAIYLKKCFDQNENCNKRIFRTIPLREIICRIKIGEKAVPSVDKDGNPLFFILSPYDLVYIPRKNEEQANLNHIERDRIFRVNDFSEGTIYFTPVSFSKEITEKEIDTSFNSKTAKFNGEQIKEICIPLKIDRLGRIISIFKTDD

SEQ ID NO: 23826 - protein, 1380 aa, unidentified
  REGION 1..1380: note = Cas Enzyme sequence
MKKILGLDLGTNSIGWAIVNEAENENEKSAIIKLGVRVNPLTVDEQRNFESGKSITTAADRTSKRSARRNLQRYKLRRENLIEVLKDNGFIRDETILSENGNYSTFETLRLRAKAVTEKISLEQFSRVLLMINKKRGYKSSRKAKSQDEGQLIDGMAIAKKLYNENITPSQLVLDILNSGKKYVPDFYRSDLQNEFDKIWEFQKQFYPEILNDEFKKIIIGKGKVNTTKIILARYQIYTADNKGKDKRIQQYQWRVDALSRELTKEELAFVISDLNGSISNSSGYLGSISDRSKELYFNKITVGQFLISQLDKNPNSSLKNQVFYRQDYLDEFNAIWETQAKYYPELSDELKNEIRDIIIFYQRRLKSQKGLISFCEFESKTIDVIIDGKKKTKTTGSRVCPKSSPLFQEFKIWQILNNLEVKDKNSDSKRILEQEEKEILFKELTIKDKLKKDEVLALLFENPKALELNYKDIEGNRTIATIFKAFESIIEISGHGEYDFSKMKYTDVIGVVEPIFTSLGISKDILYFDSNIDNDNTIEKNLYKLWHLLYSFEGDNSATGTENLINKITKDYGFEKEYAIILSNINFQDDYGSLSSKAIRKILPYLKEGNEFSVACTYAGYRHSKNSLTKDELENKELKERLEILPKNSLRNPVVEKILNQMVNVVNTAIESYGKPDEIRIELARELKKSAQEREDLSKAISKATADHDKYKEILAKEYGLSNISRNDIIRYKLYNELESNGFKTLYSNTYIPREKLFSKEFDIEHIIPQAKLFDDSFSNKTLESRAINIEKSNQTAFDYIHDKQGKEGLNDYLKRIEDIYKQGKISKTKFNKLKMKEEDIPSDFIERDLRDTQYIAKKAKSMLLELVKDVVSTSGSITDRLREDWQLVDVMKELNWDKYDKLGLTEIIENKDGQRINRIKDWTKRNDHRHHAMDALTIAFTKRSYIQYLNNLNARSDKSGSIYGIEQKELYRDDKSKLKFKPPMPLAEFRREAKNHLENTLISIKAKNKVTTQNINTSKAKSTNNKKVQLTPRGQLHLETVYGSSKVYITKEEKVGAGFNEETINKVGKKAYREALLKRLFECEGDAKKAFTGKNSLDKNPIYLDSMQTKQVPLKVELVGFETIYTIRKDISPDLKIDKVIDCKIKRILQSRLDEYNGDSKKAFSNLDENPIWLNEEKGISIKRVTISGVSNAIALHTKTDKDGNDILDKNGNKQGNDYVNTGNNHHVAIYRDDKGNLQENVISFFEATSRVNNGLPIIDKSYKHSDGWQFLFSMKQNEYFVFPNEETGFNPQDIDLLNPINYSLISPNLFYVQTMSKVTYGTAIIRDYKFRHHLETKKEDNKQLKDISFKQYKSLNFANQIIKVRINHIGEIVSVGE

SEQ ID NO: 23827 - protein, 1371 aa, unidentified
  REGION 1..1371: note = Cas Enzyme sequence
MKKILGLDLGTNSIGWALVNEAENERETSSIIKLGVRVNPLTVDEQNNFQQGKSITTNADRTSKRSARRSLQRYKLRRENLIESLKENNIITENTILSETNNFSTFQTYKLRAKAAEERIELEEFARVLLMINKKRGYKSSRKLKGQDEGELVDGMDVAKELYNKEITPGEYMLELLNKGKKNKPEFYTSDLKQEFQKIWEAQKIYYPEILTDEFQIQLNGKSKTNTSRIFLAKYGIYTAENKGKDRRLESYQWRVKALIEKVEKDVLAFIISDLNGIINNTSGYLGAISDRSKELYFNKLTVGQYLMRELNNNPHFSLKNKVFYRQDYLDEFEKIWETQKEFHSQLTNELKKEIRDIVIFYQRRLKSQKGLISYCEFENDKIEVEIEGKKKTITIGSKVCPKSSPLFQEFKIWQILNNINVIDENKNSRALEQEEKEILFKELTFKNKLSKSEALKLLFENHTKLDLNYKEIEGNRTINNFYNAFSQIVEMSGHGEYDFNKLDSGQIIDLVNSVYKTLGIREDILFFDSSLEGSDFENQPIMRLWHLLYSFEGDNSKTGIDKLLNILYKEYGFEKDYAKVIANISFQDDYSSLSSKAIKKILPHLKEGNGYDTACLLAGYRHSKSSLTTEELENKQLKDKLELLPKNSLRNPVVEKILNQMVNVVNQVIDTYGNPTEIRIELARDLKNNAEERKNMTEAISRSTKEHEEYRDIIKKEFGFSNVSRNDIIRYKLYLELKDNGFKTLYSNTYIPREKIFDKNFDIEHIIPKAKLFDDSFSNKTLELRTANIEKSEMTAYDYVKNKYTEEGLKDYLNRIDLLYKSKAISKTKYNKLKMQASEIPSDFIDRDLRDSQYIAKKARQILLEISKEVVSTSGQITDRLRKDWQLVDIMKELNWDKYDKLGMTEIVENKDSERIYRIKDWTKRNDHRHHAMDALTIAFTKHNYINYLNNLNARADKSSNAYAIEQKELYRDSHGNLKFIPPMPLNDFRVQAKQHLEDILVSIKAKNKVVTRNINTTKQKGGTNKKLQLTPRGQLHLETIYGELKQYVTKEEKIGSSFNEEKINMVAKKSYREALLKRLRDNDNDAKKAFTGKNSLDKNPLFIDELQTQKVPEKVKLVEFETQYTIRKDITPDIKIDKVIDVGIRKKLKDRLKQYDNKSKEAFSNLEENPIWLNEEKGIQIKRVKISGVSNAVSLRSKKDHFGNLILDKEGNPQKVDFVNTGNNHHVAIYKDEKGNLQENVISFFEATARANADIPIIDKSFNLDKGWQFLFTMKQNEYFVFPNEKTGFNPKEIDLFNPINYSLISPNLFRVQKLSTKDYSFRHHLETSVIENSQLKGITWLRLGLSGIKDIVKVRVNHIGQIVGVGEY

SEQ ID NO: 23828 - protein, 1226 aa, unidentified
  REGION 1..1226: note = Cas Enzyme sequence
MKKILGLDLGVSSIGWSVISVDKNGDPSEILGMGSRIVPLSTDDANEFSTGNAISKNQKRTQKRTARKGYDRYQLRRENLTAELRKHQMLPDERLIKLPVLDLWTLRANAATEGCKLSLPEIGRVLYHINQKRGYKHAKADEAGDKKQTEYIENVNKRFAMIKELGLTIGQFFANKLKESEVVSEKGTFYTYRTKEQVFPRGAYIAEFDQIIEVQRKFYPQVFTDEFINRLRNEIIFYQRNLKSCKHLVSLCEFEKREYKNKDGKIVFDGPKVAPRTSPLFQICRIWEFVNSIRLENGYKETRALSQEERLKVVDFLDNHEKMTAKDFTKLLRLDKNDEWDLKRYFGKNGVQGNTTKAQLVTALANIPNACELLRFNLALENSNYVNESTGEILKVISSNFQNEPLYMLWHTVYSLSDKEELKNALNKKYGITDESVLNNLFKIDFVKPGFGNKSAKAIRRILPFLQDGLVYSDACAEAGYNHSNSLTKSENEARTLLSRLPQIKKNELRQPVIEKILNQMVNVVNAIYDEYGQIDEIRVELARELKQSKDERNTTASNIAKRERENKNIEAKIQEFGIRSSRNRIQKYRLWEESEQKCFYCGQPVQAKEFLSGLDVEVEHVIPKSLLFDDSFANKVCACRKCNAAKGNKTAYDFMKGQKEEVFDAYVKRVNDFYKDGKISKTKKERLLTTQSEIPSDFIERQLRQTQYIAKKALEMLKDVCYNVYATSGSVTDFIRHTWGYDEILHQLNYDRYKKGGLTEFREYDHKGETHTEERIQDWSKRLDHRHHAIDALVIAMTRQSIIQRLNHLNTERDAMFQEVEKQRKEWKNDYSMLQEWLRERKHFSAEDVAKKVSDILVSFKAGKRVATIGKRVKYEHGKKNVLQTGIVIPRGPLSEESVYGKIKVLDRNKPVKHLFENPESIVNADIKSAVTNRLIQNKSDVKKAVQSLKKSPIVLANGKTLENADCYKEEYVIKYSLNGFKAKDIDSIVDTHIKDVLYKRLEEYNGNEKEAFKDIENNPIYADAAHKIKIRNVRCFTGLSAVVPVKKDENGNAIGFVKPGNNHHVAIYKDENGNLQESVATFWHAVERKKYGLPIVITNPIDAWKLARERNCPKEFLDCLPKENWTFVQSLQINEMFVMGLTNEAYEKAVAEKDYALLNQHLYRVQSLSANDYFFRLHLETKIDNSQESRDIGKFIRTKSLKSFAQMEPHKVQVSVLGKLIAKD

SEQ ID NO: 23829 - protein, 1512 aa, unidentified
  REGION 1..1512: note = Cas Enzyme sequence
MKKILGLDLGTNSIGWAVVNADEITRNDGSRYLKPNSISAAGSRIIPMSADILGDFEKGNSISQTAERTRMRMARRLHERALLRRERLLRVLNLLDFLPKHFADKIDRYGKFTDDSEPKLAWRKNTEGKYEFIFQDAFNEMLAEFKDKQPEIVEEGKKIPYDWTIYYLRKKALEKALSKEELSWLLLQFNQKRGYYQLRGEEEEEKRDKRIEFFAQKVVKVEATDQKKGDDVWYNVFLENGMIYRRTSKTPLDWEGKIKEFIVTTEVESDGKTPKKDKEGNIKRSFRAPNEDDWTLLKKKTEADIEKSSKTVGCYIYDSLLSNPKQKIIGKLVRTVERKFYKEELAQIFKKQVELIPELRNDDLYKQCIEELYPINEAHRNIIAKTDFANLFINDILFYQRPLKSKKSLIDNCPYEERIFIDSKTGEKKKVPIKCIAKSNPLFQEFRLWQFIQNLRIYQREKEINGKLLTDIDITSECLKSEEDYVRLFDWLNDRESIEQEELLKHLFNTKKSKNKENPYRWNYVEDKIYPCNETRATILKGLSKSGIDSSVLSPEMEMALWHILYSVEDKKEIEKALTRFAQKQGWNSEFATIFSKLKPFKKDYGSYSEKAIKKLLSLMRMGKYWNQDNIDKNTLDRIDKIINGEYDEKISNRVRDNAINLKDISDFRGLPVWLACYIVYDRHSEAKDCTKWNTPEEINSYLKEFKQHSLRNPIVEQVVTETLRTVRDIWKQEGQIDEIHLELGRDLKNPADKRKKMSENILKNENTNLRIKAMLMEFMNPAMGIENVRPYSPSQQDILRIYEENALDNLTKEDKDFDFISKISKQAQPSKSDIVRYKCWLEQKYRSPYTGKTISLSKLFTSAYEIEHIIPQSRYFDDSFSNKVICEAEVNKLKDRQLGYEFIAEHHGEKVQLSQGEVVEILSVDAYEKFVKENYANNRVKMKKMLMENIPDEFIERQLNDSRYISKVVKGLLSNIVREKIDDENYEPEAVSKNLISCNGAVTDHLKKDWGMNDVWNSIILPRFIRMNQITGKDCFTTTNAEGHLIPQMPLELQKGFNKKRIDHRHHAMDAIVIACTTRDHVNLLNNEAAHSKYNTNRYQLQRKLRRFEKTVIDGKEREVAKEFLKPWDSFTMDSKNILENIIVSFKQNQRVINKTTNAFQHFDENGKKTFAKQGKGDSWAIRKPMHKDTVFGEINLRKVKSVSLNEAIKVPERILNKNIKEKILELKNNKIDAKNIKKYIEEYHIGGYGIDTSKIDVFYFTKETKERFFATRKSLDSSFNQAKIEDSIADSGIQKILLAHLKSKNGDAEQAFSPDGIDEMNKNIVELNNGKFHQPILKVRVYEKADKFAVGQKGNKKVKFVEAAKGTNLFFAIFEKDGKRSYLTIPLNVMIDCQKQYGNQWKNNIEAYLKEKELAEKDVKLQFILSPNDLVYLPTEGSIDKKRIYKVVSFTNNRLYAIPYAIAKSIVDKNEFTQLNKIEFTDNKESIKDACVPVIIDRLGNVIEFNGKRL

SEQ ID NO: 23830 - protein, 1162 aa, unidentified
  REGION 1..1162: note = Cas Enzyme sequence
LRAKLRETMIKHILGLDLGVGSIGWALIETEDDQPKQIIGMGSRIVPISKDDSDQFSKGQAISKNADRTARRTTRKGYDRYQLRRALLTQVLRQNGMLPERMDENVIDLWKLRSDAATEGHQLTLPQIGRVLYHINQKRGYKHAKADDNGDSKQTKYVEAVNQRYTEIQEAKQTVGQHFYLELLRSKVERGNGPYYTFRIKDKVFPRAAYIAEFDQIMKVQRAYYPEALTDEFIDTLRNRIIFYQRPLKSCKHLVSLCEFEMKPYKTKDGKIVYGGPKCAPRTSPLAQLCTMWETVNNITLTNRNNERYEFSLDERKQLVEHLCTHEVLKLTDLYKILGITKKDGWYGGKAIGKGIKGNATLNQLRKALNGKYGEWLEMPIERIDAIDIETAEVFWQVSPKVEETPLFKLWHAVYSIQDVDELAKTLRNKFGIDDQEVIDALCKIDFVKPGYANKSHKFIRRLLPYLMEGMMYSEACARIGINHSNSMTAEERDARQLCDHIELLQKNALRQPVIEKILNQMINLVNRLQQEYGPIDEARVELARELKQSREEREGAYRRNNQNERLNKEIAAKIEEMGIRPSRSRIQKYKMWEESNHRCMYCGKTVSLAEFLNGADVEIEHIIPRSILFDDSFSNKVCACRECNHEKGNMTALDYLETKPAAEVEAYKQRVDEAFKEGRISKTKRDHLLWHRTDIPTDFIDRQLRQSQYIAVKAVEILQQGIRQVWTSGGSVTDFLRHQWGYDEILHTLNLPRYRQVEDLTEIVHYEHVGQEHEEERIKNWSKRIDHRHHAIDALTVALTRQAYIQRLNTLEASHDFMEKQVKEAGTQYNEKKSILEKWILEQPHFSVEDVTQSVDGILVSFRAGKRVTTPARRAIYQGGKRTIVQRNIQVPRGALTEETIYGKLGDKFVVKYPLDHPSMKPENIVDPTIRALVQKRVAERGKDAFKEPLYSAEGMIIRSVRCYTSLSENGVVPVKQDEQGRNIGYAKKGNNHHVAIYQDKSGQYQEMVVSFWDAVERKKYGVPVVITDPHDVWDSIMDKDLPQKFLEKLPKDNWTYILSMQENEMFVLGMEEDEFNDAIESKDYISLNKHLYRVQKLTSHDYNFRYHTETKVDDKYEGVSNGANVSYSLGALVRSRSFNNLFGIFPHKVKIDIMGRITKA

SEQ ID NO: 23831 - protein, 1489 aa, unidentified
  REGION 1..1489: note = Cas Enzyme sequence
MKKKILGLDLGTNSIGWAVLAEEDNQKHISCAGSRIIPMDAALMGDFESGNSVSQTKNRTAARGVRRLYERHALRRERLNRVLSLLGCLPHYYTKELNRYGQLNKGAEPKLAWTKVDGKHVFLFQDSFHEMVREFVKIHPELLVNGRNIAYDWTIYYLRKKALTQAITKQELAWILHQFNQKRGYNQARGEEEEEKTNERKELMTLKVVAVRNTGEVSKGRTWYEIELENGWVYRRQSAYPIDWEGKIRDFIVTTKLNADGTEAKDKEGKVKRSLSAPKEDDWGLRKIKTQHDIDNSCKTVGEFIYDALLQNPDQKILGQLVRVVDRKYYIDELHRILECQKQYIPELCNAELYKACIEALYPQNEAYRNSIAGKDFTYLLLKDVLFYQRPLKSKKSLISECPYEYHVYKTKDGEWKRQYLKCISKSHPLYEEFRVWQFVENLHIYREQANEIGKEDCTAEYITNKAELVEWLLTQKEISEKTITEHIAGKKVKGLSWNYVSDKKYPAAPITATLTTILNEAGGISTDDNIAHIWHILYSVSDKVQLVAALKHYAEAHGLSNVFVEKLSKMKPFEPDYGAYSEKAIRKLLAIMRCGKYWSEEAIDDQTKDRIQHILTGEVDDRISEQVRTKLDSMNELSDFQGLPLWLVEYVVYDVRKNDTKWEKPEDIDAYLQAFRLHSLNNPIVEQVVMESLRTVRDIWKQEGQIDEIHIELGRELKQNAEQRKKALERQQVNEKANLRAKLLLQEFMNPDMGIEGVRAYSPSQQELFRIYEDDVLSANKADDEIQRIINDLSSLKQPSAQDIKKYRLWLDQKYISPYTGQPIPLAKLFTPAYQIEHMIPQSRYFDDSMSNKVICEAEVNALKDRMLAHEFIATHGGEKVTLTGGRIVTILTLEAYEDVVRKNFAGNKAKQEKMMLDEIPEKFIARQMNDSRYISRLMLGLLSNIVREKISPTEYEPETTSKNVIVCNGATTTRLKKDWGISDVWNRIILPRFERLNQLQGTTAFTYKTANGHIIPNVPLELRKGFEKKRIDHRHHAMDAIVIACTTRSHVALLSNEAALDKDEKARYDLQTKLRKRESWRGADGREHTKFTDFIAPYEGFQKEVQETLENIIVSFKQNLRVINKSNNRSIRFVDGKKKAVRQTKGDNWSIRKSLHKETVFGKVNLRKKKYVNLSYALEHIGDVVEKDLRAKLRELVQAGKTEKQIKQYFASEPDVWADVNLKRIECYYFTEDANEHYYAVRTAIDESFTEDYIRNKVTSQSVQKILLAHLEHCGGDPNLAFSPDGIEQMNADIQLLNNGVLHKPIKKVRVCERAEKFAIGQVGVKSKKFVEAAKGTKLFTMVYEKVSPDGSKVRKLIALNLIDVIQAQKQLGKKWVQYIDEKLRSNGDLPAEWLFAFVISPGDLVYVPTEEEIRERHLDYSIQNIYKVVSLDGENPNFIPANIASMIIDGNEYTRHNKTSRDAYGRLIKEICIPIKVSRLGNIIEL

SEQ ID NO: 23832 - protein, 1451 aa, unidentified
  REGION 1..1451: note = Cas Enzyme sequence
MKKILGLDLGTNSIGWSLIEQDFDKKEGEILGMGSRIIPMDQGVLGKFDSGNSISQTAERTDYRGMRRLNERYLLRRQRLHRVLNILGFLPTHYAEAIDFHNKLGQFLPGKEVKFNYQLNGGPKHQFIFQKSFEEMAEEFKAKHPDLKIPYDWTLYYLRKKALSEKISKEELAWVILNFNQKRGYYQLRGEDEETDKNQEYVSLQVKELTDTGEAVKGKPLYKVIFVNGWEYDRDITKTKEWENQEREFIVTTKTNKDGSTKRTFKKVDSELDWIAIKQKTQQNIDESKKTVGQYIYGSLLEKPNQKIRGNLVKTIDRKYYKKELSKILEVQKKFHPELQNNDLYQKCLNELYPRNEAHQANIKSNDFTYLFIEDIIFYQRPLKTKKSTISNCAYEKRYFKKDDELVEKPLKGIPKSNPLYQEFRLWQFIQNLRIYKNITDGEGKTKIDEDITKALLPDTSSIVDLFDFLNDRKEIDQNQLIKYFSDLKLIPKQKKDSSLFRWNYVEDKKYPCNITRAEFLSRIKKIKEVSKDFFDQKNEKELWHIVYSVKDKKDFEKALETFAEKKQIPQEEFVENFKKIPPYPNDYGAYSEKSIKKLLPLMRMGKYWTDDSINTEIKNQINDILERLEAINFDKEKIETVADDAYKKQVLKSFSKFKDKENPLEGLNTYQACYAVYERHSEISEIINWKTPADIDSYLNEIFKQHQLRNPIVEQVVTETLRVVRDIWKHYGNSEKDFFSEIHLELGREMKNSAEKRQRLSRQNTDRENTNQRIKAILEELQNEGIEAIKPYSPNQQEILKLYEEGVYYNAKYDQVSEDEIEAIRKKNAPTKKDILRYKLWLEQGYRSPYTGNIIPMSKLFTTDYQIEHIIPQSRFFDDSFNNKVICESAINPYPYKDNQLAYEFINNSRGCVVPELANNGKECTIFTLEEYEDHCKSYFRKNRTKLKYLLSEDIPEGFVNRQLNDSRYISKFIKGLLSNILREPNEREATVKNLIPVNGAITSQLKQDWGLNDKWNEIIAPRFKRMNEVTQSNDYGYWDKKINAFRTQVPKEIEPGFSKKRIDHRHHALDALVIACTTKDHINYITSINTERKNHSLVKKLRQTKEIELGGKKRTVAKSYKKPWKGFTIDAKNALEEIVISFKKNIRVINRSNNKTWYWEKKNGQWKKSLQLQKGKNFAIRKPLHKETVSGLIDIPTPKGKVATATRINISDIKNHKHIDKITDNSIQKILRNHVKNYLDEKGKEDFEEAFSPKGIAELNKNIKTLNNGKDHQPIYKVRQYEVGSKFSVGESGNKTDKYVEAAKGTNLYFAVYWDEKKQKRNFETIPLNEVVEHQKQMAHIPMKDKEPIPIDHTKGNLLFYLSPNDLVYVPIGKDLESDIGPEKLVKENIFKIVSFTNTRLYALPNTVAISIKNKIEFNQLNKIEFTSEKLSCWKLDVDRLGNMKKLIK

SEQ ID NO: 23833 - protein, 1449 aa, unidentified
  REGION 1..1449: note = Cas Enzyme sequence
VYISIYKFAHFDFAIIKENEGNYKFLFIDSYNEMLKDFRLNQPDLFYEKENGEETKIAYDWTLYYLRKKALTEKISKEELSWVLLNFNQKRGYYQLRGEEEEKKEGVSKTFEVLKVKELVVSEQTIKGKDIVLYDVIFENGWTYSQPIAKKEDWEGKTREFIVTESTLKSGDIKRSYKSVDSTKDWLAIKSKTEQDIENYVESGNNKTVGTYIYEVLLQNPDQKIRGSLIKTIERKFYKNELREILKTQLKFHSELENNDLYKECLNELYRRNEAHKNNIKSKGFDYLFLDDIIFYQRPLKSKKSLISGCQFEKHPLKDKEGNYIKNEDGDLTFKPLKAISKSHPLFQEFRLWQFLKNLKFYKKVDADGGLVEEEVTNEWLKDEEAWVELFDFLNVRKEINQDQMIKFFIDQKIISKTEKSDYRWNYVEDNKYPCNETKAQFITRLKKVSDLSVKEFLTNEMELKLWHIIYSVTDKVEYERALDNFALRNDLDNNSFVESFKSFPPFGSDYGAFSEKAIKKMLPLMRRGKYFSDSDVLVSIKTRIEQIMARVNDINLSLKDDDLKNELERLSDSDVPVRLIKSFIPFKDRNPFSGLNTYQVSYATYNRHSEPGVIDKWRTSADIDVFLNTTFKQHSLRNPIVEKIVTETLRTVRDIWKFYGEGKENFFDSIHVELGREMKNSADKRKQMTSRISDNENTNERIKGLLKELKDDGNIEGDINPYSPSQQSILKIFEEGVFQNPAVSFLKVNEDDISKIRKSNAPTSSEIVKYKLWLEQGYISPYTGKIISLSELFTTKYEIEHIIPQSRYFDNSMGNKIICESEVNRLKDNKTGAEFIKKHSGEMVSLGQGKSVQLFSLEAYENHCNQYFKKNRTKLKNLLSEDIPEGFINRQLNDSRYISSVIKSLLSNIVREDDEKEAISKNLIPVTGSITSKLKQDWGLNDKWNELIIPRFKRLNELTRTKDFTYLNEQGVEVPTVPDDIAKGFNKKRIDHRHHALDALVIACCTKKHTHYLSSLNSEKENFGLRDALLIKNKNSDYTKYFLPPWSKFAVEAKDSLDKTIISFKSNNRVINKTNNKTWQWVEEKGKYNKKLVKQTKGENWAIRKALHKETVSGLVFIDEGKIVQISKAVEVSNLIVDKNIRNKVDELVGKTVKEKQAYLKKNPISINGEKIAKVTVFTKATATRKALSEVKNLKVLEKITDGGIQKILINHLKSYVTEKGDSDFENAFNQEGVEELNKNIKELNNGKKHNPIYKVRIYEAGSKFAVGQEGNRKDKYVEAAKGTNLFFAIYEGEDKKRTYETIPLNVVIEHQKQTANIPKEHRTSIPVGNNKGKLLFSLSPNDLVFVPTDEEIDNFNLVDFNDLNKEQVERIYKMVSCTGAELHFVPNTISVEIKKNENGTNAKSERIQNFYNDDCVFDDKDGKPVMIKTRCWKLELDRLGNVLNVIR

SEQ ID NO: 23834 - protein, 1382 aa, unidentified
  REGION 1..1382: note = Cas Enzyme sequence
MKKILGLDLGTTSIGWALVNEAENEKETSSIIKTGVRVVPLSADEQISFEKGQSITINADRTLKRGMRRNLHRYKMRRNAVVDILNETGFISESTNLAEVDENSTFSTYAARAKAPNQKITKDEFARVLLMINKKRGYKSSRKANNEEEGQLIDGMAIAKKLHKEKLTPGELSFLLLKEGKKSLPAYYRSDLQAEFDAIWKFQKQFYPEKLTPEHQENLFGKNKRDSSNYFEKTMNLERAENKGSDKKLQQYEWRQKAITEQLELSKLAFILTELNNQINQSSGYLGAISDRSKELYFNDLTVGQYLYNQLEENSHASLKNQVFYRQDYIDEFDAIWEEQAKHYKELTPEVREQLRDITIFYQRRLKSQKGLINICEFEGVERIVIIDGEKKKKLIGPRVAPKSSPVFQQFKIWQNINAIRITKRDNETAVYELEEETKQELFKELNWVKQMTDKIFLEWLFKDSKNNPKKWKLNFKHLEGNRTNADLLEAYNKILVSEGYEKVTFGKLPAEDNLTALKECFRAIGIRPEILDFKIDLRGNNFSQQPCYEFWHLLYSYEDDDSPTGTASLLHKLQEKFGFKEEHARLLAGISFPKDYGSLSVRAMRKIIPHLEEGFTYDEACSRAGYNHSSSITKAENEDRELKPELEILKKNSLRNPVVEKILNQMINVVNAIIKDSNLGRPDEIRIELARELKKTAQQRNEMTSQIAKVTKDYQEIRTLLKKEFGLPYVSRKDLIKYRLYKELKATGYKTLYSGTYIKPEELFTNKFDVEHIIPQSLLFDDSFSNKTLELRDVNLEKGNETALDYCERKGWLEDFKKRVEEVYSAGDIKYMNRKKLLMTKAEIPEGFLNRDLGNSAYIARKSAQILLDITRKVNLTSGTVTSKLREDWELVEVLKELNFEKYKAQGLTYTVENRHGKELSRITDWTKRNDHRHHAMDAITVAFTKPAYIQYLNNMSGDSKKGGEFYGVKEKYTYRDKEGGRKFVKPFNNVRQEAKNHLESILVSHKAKNKVVTNNKNKIKEKGKGNFKIKTELTPRGQLHKETIYGSSKEYITKLEKVGGVFDAEKIYTVAKKKYREALLKRLKEFDDDPKKAFTGKNSLAKNPIYLNDKGATLPEKVNTVTFTNRFTIRKSISPDNFKDAKSLLKIVDVGIRKILQKRLEDYGGKPKEAFSNLDDNPIWLNENKGIQLKRVTITGVNNAEPLHTAKDHLGKEIKDKNGEGIPVDYVSTGNNHHVAIYEDEKGNFQEEVVSFYEAVIRKNLDQPIIKKNHEKGWKFIFTMKQNEMFIFPSEDFNPLEVDLLDPANSTSISNRLFRVQKISTKNYVFTHHLETEAVGAETFKNKKELSDITYQFIRTEKNLKGIQKIRVNHLGNVVQVGEY

SEQ ID NO: 23835 - protein, 1404 aa, unidentified
  REGION 1..1404: note = Cas Enzyme sequence
MGKILGIDLGSNSTGWAIRNTDLEGNQIEDFGVIIFEKGVASEKGNEYPKVQKRTESRGKRRNYQAEKYRKFGILQFLIEKNMCPLSIEDFNNWKTYRKGKKREYPQSEKFLNWIRFDFDGDGKPDFHLFGKDKDESYYVFRTFASNPDYKNVFYENPQILGRVFYQLVQRRGFKGRDEEEAKTMLTGSEKNGTKGRNDIEEYIEKYKTLGAALYYYQKDCGGRIRQRYNLRKDIEAELKIICDLHHISKEDYSKLWKAIIWQRPLRTQKGLIGNCIYEKGKKRIAVSHPLYEEYRTWVFINNLNIIPPADENKQEYIQAKIYPLFYKSKPDFELSDIDKQLKKDGAKRTSKHHEKTKVLSVKLLKQLQDVFGENWKEILKWDVNGDRSSQPAKKTDSEYTFEDVWHVLMTFDGQENLKKFALEKLNLDEEKATRFSKIKLQQGFATLSISAIKKILPYLQKGFLYSHAVYMANLYKILGESVISETLTNHFSEEILKILNQDSANRKNSAIVNSLISEMLNDKHRYYISDDRDLDESEKKVVLKSIVDNYGQESWDALAEEKKEEVINYVSGKYLEFLKKSFFDKKNLFVQPERIDEKVFNFLKETYHVSDDMKKHLWHPSEQENYAEAENYLEYSVGKKKYYVKEKNKDGFVKRNPEAEFEGREIKLLGNPEPLSKGFKNPMALKSLHKIKNLVNYLLQTRKIDEDTRVVIEIARELNDKNKRKAIELWQKEREKENDDYKKELAVYQEQFPSVKLIDENTLIRKIRLWHEQNKICLYTGKTISFADLIVNNKYDFEHTIPASISFDNELKNLTIADSGYNRIQKGKKFPTQLINYDSEQVINGETYNAIINNIEFLFGERTVEYKEEKGKTKKIVKWKKITELEKQFDEWKKRASYASTKDYKDFCIVKYHTIKMDLDYLKSKLATFTITEYKAGWRNNQLRDTQIVTKYALPYFKTLFKRVSVEKGGVTDIFKKVYRVQSKDSKKDRSVHSHHAQDAAILTLIPNAFHRERIIKAYQEEIDKRTGKTYHELPLDWEMFSENYILELKDKVLINNLTDSRTIAQTYKTVRKRGKIVYDIDDNGNKNKRVSSGDTIRGQLHGETFYGAIKQPLRDEDNKILFDENKKMILKDEIYLAVRKPLLYKKDANSSGFKTLDEVEKVIVDKNLFKMIKKQVEESDFKTALAKGVFMLDKNGNKVNKIRTIRCYENGLKYSSAIKVHNHSFVSNKDYKQTTLATNGENTYCLFYKSDFGRAMRILSIVDVAELKLKNVQNLFNEPEFSSFESGKGKNKTQLPLYSVLKSGDKVLFYKESVHELRDLGQEELSNRMFKMYQFEKDGRIKFRHHLAAGIDTELKKDNPEYSSVNFDEKQIFLRLSQGQWNFAIENTDFEMALDGSIKWNF

SEQ ID NO: 23836 - protein, 1358 aa, unidentified
  REGION 1..1358: note = Cas Enzyme sequence
MKKILGLDLGTTSIGWAFINEAENDNETSSIINTGVRIVPLTTDEEADFKKGNTISINADRTLKRGARRGLQRFKQRRDALLETFSKIKFIPTDFIYAETGSATTFSSYQLRAKAAVEAVTKEELVQVLLMLNKKRGYKSSRKAKTAEEGDAIDGMKIAKEIFENNLTPGQWVYNSLSKGGKFIPDFYRSDLQKELEKIVRFQNQFHSEQMNDNLLEDIHGKSRTLTSQHFSKTMDIPLTENKGTREETKLQHYKWRNEALTNELDLKILAFIITEINNQINQSSGYLGAISDRSKELYFNQETVGQFQYRQLQKNAHAKLKNQVFYRQDYLDEFEKIWETQAKFHPELNDKLKSEVRDITIFYQRKLKSQKHLVSFCEFEKGHKAIPKSSPLFQEFRIWQNLNNVVVKNELTKECPPISEELKQLIAQELLFKENMTDSQLINFCGLKKAEYSVNFKKIEGNRTNTSIYKAFEKILVLEGYDELDLSKLEAFDIKNIIKSAFNDLGINTDILDFDPTIQGNDFDKQPYYQLWHLLYSAEEDEPLKKSLMSKFGFKENHIPFLLNINLQADYGSLSAKAIKKVLPHLMDGHIYDKACTMVGYNHSSSLTTEQNNDRVLKDTLELLKKNSLRNPVVEKILNQMINVINAIITDPAMGKPDEIRVELARELKNNNEQRNEMTKTINKSTAEHEQIRKLLRTEYGISRVTKNDITRYKLWKETDGISLYTGKPIEPSLLFTKEYDIEHIIPKSRLFDDSFSNKTLCERQFNIEKSNRTAFSYCEERLTEFEFSQYENRVKDLFKTGKIKYTKYKKLLLADHEIPEDFIARQLRETQYIAKKAKEILLEVSRNVTATIGSVTDKLREDWELVDVMQELNWEKYDKLGLTYIEEGKNGERLRKIKDWTKRNDHRHHAMDAITVAFTKPVYIQYLNNLNARNKEDKKGAEIYGIETKYLHKDKNGKLRFKKPMTHFREEAKKQLESILISYKAKNKVVTKNKNITKKSGGTHQKIQLTPRGQLHKETVYGKLQHYVTKEEKVNANFTQEQINKVAIKQYREALLARLAENNNDPKKAFTGKNVLAKNPIYLDAEKTIALPEKVKLVWLEDKFTIRKDVTPDNFKDLKNIEKVIDPKVKLLLQKRLSQYGDAKKAFSNLDENPIWLNKEKGIAIKRVTISGVSNAQALHTKKDHLGNEILDENGKTIGVDFVSTGNNHHVAIYRDGKGNLQEEVVSFYDAVVRRNLGLSVINKNHQNGWEFLFSMKQNEYFVFPSEIFNPQEIDLLNSDNHHLISPNIFRVQKISTKNYMFNHHLETKSVDGETLKSKKELSKITYHFIQTPSNLKNIVKIRINHLGQIVQQGEY

SEQ ID NO: 23837 - protein, 1421 aa, unidentified
  REGION 1..1421: note = Cas Enzyme sequence
MKKNLGLDLGTNSIGWALVSTDVNGKPCKIEGMGSRIIPMGTDKQDYEKGVGITKNATRREKRTARKGNKRYKLRRNKLLFILNELEMLPEQFQFKNGIPEPTKLQNLELLPVSKKTKQLDALGLLELKVRALNNPVELKDFGKILYQFNQLRGYSGGDNEDSTIKKQDEDEDASKKNYEVVVQKVEIIKVEQSDNTFTVRGGKNKGEKQYYFDAKIIFNGEEVEGQTELQNLKEKEGLEEELEIRIKRKKDDEVTYKFALPQKSNWRKAMELSEKTLKEEKLFISQLRLRDLQQNKWAKIRNRVFLRNRYKEEFDKVWDTQAEQHSILKNCPEETLNKIADYIFPGNSESQKHLRKIALEKGLKYIIKEQVIYYQRPLKLQNELIGNCRFEKEEKVIPTSHPFFQEFRCWKQINNLFVTSKTLVGNKYTYQNRYLTAEEKWAIYEKLQTQKEVGFATIVEILNIDKSKDKLDKEQKDFFLNGLNVKAKLKGCDTFLSFKKELGEYFNDFISQDKQLVGKLWTVIFDVKNHDGSEYDVESKRVSSIIEVLRNYIEEETAKELSLKLAQKISFPRKYASLSEMAIRNILPLMLPNPQSIPDTIQQQFKNIQYLIETGEILDNPKYKLEDYVIDFVRTNPNLLKDGGIMESFAISLVYGKHTAETIKPQIMNYHDIKFEERNLRNPVVEQLANETMQVIKAIWKQYKFNPEELEIRVELARDLKNSAAEREKIWNGQRKSKVINDRAKEILSENGIAITDENILKYRLYEQQKFMSPYTQKKIIPFSKLFDDKEYDVDHIIPKSRYYDDSFSNKVICEKYINEEKSNRTAWEYIIQQNSKYKNENGELEIVSANEFIRHVNDNYFGKKKRNLLAEKIPSNPVERQLKDTQYISVAIKSELAKIVGSDNVKTSTGEVTDFLRSRWGLRKLFMNLTESRFKQMEFWDLDENGKPKTQWVNRYVDENNKNQYEIKNWSKRYDHRHHSIDALVVALTTQSHIHRLNNLNKYYQDELTVRKEEFGITVKEGQGILEGFFNLEAKRRDEILQKIESSRYFEMPFENLVEQVKSQLETMVVSHKPKDKLGIKTDDFDKNTPDKKLKKQVKIRAGLHQETYYGKLNKRDTKRVEISSLSLSDVSKIIIDKVLANEIIGHKKQYNSMKEAFTGEGLKAFNDKRIADGKQPAYKVNVWYNKEEKKESGLQRLYDKNDKQSVITGDNYLFLVMEKNGKRIFDIASLYDSVSIATDALKDGVDDFKKQIVEDYRIKHKEKPEKVLFTLQQNELVYLPNNIEEREFLLGMSVDEFRDWINVKANKKAFSNRVYKVVMFTGMDCKFIPHNYSNVISVPKELTKEQKDQLKNKYEEKKGIPKNELNFVEFGSYRDCSPYETGEVFVKSLVNKKQKQRPLKIQDSCIKIKIDWLGNISL

SEQ ID NO: 23838 - protein, 1514 aa, unidentified
  REGION 1..1514: note = Cas Enzyme sequence
MDNLNKKYYDLGFDIGTNSIGWALIERGTKIKAAGSRIIPMDRESLDNFNAGKSGQTTSPCSERTTFRMTRRIKERSILRRERLHRVLNVLNFLPKHYADSIDFENKLGQFKNGIESKLAYVEGDFIFMESYQEMLAEFQKKHPSLLSQGKRLPYDWTIYYLRKKAIAKKITVEELAWLLLHFNQKRGYYQLRGEDAEENLSKREECFTLKVISVEDSGDRKGVDDIWYNITLENGWIYKRTSKVYLDWVGHVKDFIVTTSIDDQGNIKLDKDGKEKRNLRLPSPEDWTLVKKKTERNIIESNQTVGCYIYEALLNSPDKKIKGGLVKTIERKLYKAELIQILEKQKEFHPKLNDKEVYHKCILELYKSNDSYRHLISNRGFIYLFVSDIIFYQRPLKSKKSLIENCQYEYRQYIDKENEKQRVPLKCIARSNPLFQEFRLWQFVKNLKIYQREKTLNGKLVTDVDVTSEFLKDEYEIESLFRWLNERNEIKQEQLLKYPKFGLKKDFVKYRWNYVEDKTYPCNKTHHDIQVRLRKFVPLDSDLLSINNEQKLWHMLYSIEDKIELHTALTRYARKNKLSEEFVLLFEKFPPFEKKYGSYSEKAIKKMLPLMRLGSLWNEEAIDAKLKERIQNTLDGVVDDSISEKTRIFYSENKEIKGLKSISQFKGLSLSTICYLVYGRHSESVDSVKWRSPEDITAYLNTFKQHTLKNPIAEKIILETLRVARDIWQYHGKGVADFFSEIHVELGRELKNDAQTRMNMSAQMTKNELTNVRIKALLIELAEDGMTENVRPYSLSQQEILKIYEDGVLSSGVSVEGDIDKILKMKSPSKKDILRYKCWLEQKYRSPYTGAVIPLSRLFTTDYEIEHIIPQARYFDDSYNNKVICESAVNKKKRATLAYSFIVSNEGSIIDLGFGKSVKIFTSSEYEEFVKYHYKNNRRKLSNLLLDEIPDSFISRQLNDTRYISKVVKNLLSNIVRETGEDQVTSKNLISCNGQITDRLKREWGMNDIWNQIVSERFQRLNEKTSSQAYGYWDNINGMRVFRTAVPSKIEQGFNKKRIDHRHHAMDAIVIACTTRSHVNYLNNSHANKETIKYDLRANLCVKKRYDEAGSYIWQFIKPWSTFTQDAHAALDSTQITFKQNLRVINKTTNYYQKIVEGKKILVKQEKGDNWAIRKPLHKDTVLGLVNIRKKREVQLSVAIDNWQMIVDKNIRKQIKKMFAEGMDKKKILSFLKTENSASTDKPMKKIEIYYIDKTNVASRSVLDDKITIKIILEKITDPSISKIFLAHLQQEKYLKKDSKEKDSKEIEYDPALAFSTEGIQEMNQNIQQLNGGKPHKPIYSYRVYEIQGLKFPIGVEGLNAKKWVESAKGTNLFFAIYVDQEGKRSYATIPFNIVVERQKQGLPSVPEMMNESKLLFSLSPNELVYVPTVDEIENGIPLDLDDLTKLKGRIYKMVSSTQSRCFFIPSQISKSIIETEELGANNKSERSWDDLMIKGICHKIVLDRIGNIVKMY

SEQ ID NO: 23839 - protein, 1243 aa, unidentified
  REGION 1..1243: note = Cas Enzyme sequence
MKRILGLDLGSASIGWALIEENNNKTSIVGLGSRIIPYEGTEGKDFAKGTGESRNSLRTKARTARKGYDRYQLRRKYLVDALVKANMFPDETLKNLPKIELWALRNKAVHSQITLKELGRLLLWLNQKRGYKSSRSDANLGKKDTEYVATVKSRHEKIKELNLTIGQFFYQELYNDPFFKVKENIFPREAYIEEFDAICNTQKQFYPDTLTEEFISKLRNEIIYYQRPLKSQKGLVSVCEFEGFWRKGKDGKEYFVGPKVAPKSSPVYQLSKMWENINNIKVGSRNGGDIEITPEQKQAIFQHLDNNEKLTVTDLLKILKLDRKNCYVNKQIEKGLIGNITKHAIRQCLGDSVKYNHLLSLNLNIIESDKKGYLVDKKTGEVLNEKTAQYIDAKIEHEPLYQLWHTIYSIQDKQECSNALQAKFEIEPTIADKFADIDFSKHAFGNKSAKAIRKILPYLMEGDKYSEAMSYAGYEHSDSLTKDENLKRKLLDTLKPIEKNSLRQPIVEKILNQMVNVVNAIIEKYGKPDEIRVELARELKQSKEERNDTDKAMSKRQRENENITKRLAEYGLKATRNNIIKWRLYEEIDNEEKKLNAVCIYCGQPISLTEAIKGNDVDIEHIIPKSKLFDDSQSNKTLAHRHCNKNKNDMTAYDFMKSKPTEVFEAYIERVNLLYANYVINKAKRDKLLMPEDKIPDNFIDRQLRESQYIARKAREILQTICHNVWATSGTITAELRHLWGWDDVTMNLQFEKYKQLGLTEMVEWESEHGKNKHRKEVISGWTKRDDHRHHAIDALTIACTKQGYIQRFNTLSAEKTREDMKSAVEQKSVVFNEKRSLLEKYIISEQPIEVSKVEDAVANILISFKSGKKVAVVGTRKTGKRGNKKVVQTGIVVPRGALSEDSVYGKIKTIDEKKPLKYIFENSQLILKPFIKQLVEERIEAHKGDIKKAIVSLKKEPIYLDKEKEVVLEYASCYKTEYVIKYSVDINFNKVDKVIDSKIKSILQQRLDKFGGKAKEAFKDVQSGDKSIIKWYEDEGLERPVKSVRCFTGLSAVVPVKKDEKGKDIGFVKPGNNHHIAIYIDNDGNKFEHVCTFWHAVERKKYGIPVIIKDASEVWDKIQLQPEGTYPESFLEKLPDVQLKLELSMQQNEMFVLGMANEDIQTAIETEDYKNISDKLYRVQKMSIIPSSGQLDITFRHHLETQLTDDANAKSSKRFLKAQSVNSLFSLNPYKLKIDRLGNIAI

SEQ ID NO: 23840 - protein, 1356 aa, unidentified
  REGION 1..1356: note = Cas Enzyme sequence
EAENENEQSKIIKLGVRVNPLTTDEQSDFEKGKSITINADRTLKRGARRNLQRVKQRRENLIEILKSNNFITDETILAEQGNKTTFETWSLRAKAAQDKIEKNEFARVLLAINKKRGYKSSRKAKNEEDGQIIDGMAVALKLYNEKLTPGQYCYSILKNGKKALPDFYRSDLQAEFDIVWNFQKQFYADILTDDFYKKLQGQGMQNTRKMFLAIHKIYTAENKGTRDEKKLQAYLWRSKAISEQLPIEEVAFVITEINNNLNQSSGYLGAISDRSKELYFNKQTVGQYLYAQIQKNSHTRLKGQVFYRQDYLDEFEKIWETQKQFHSELTDDLKEEIRDVVIFYQRKLKSQKSLISFCEFESSQKEVLVEGKTKLITIGNRVCPKSSPLFQEFKIWQILSNLIIRNKNTKEEFQFDIETKQLLFNELNIKGNLKKEEILKMLVNKPNEWEMNYSTIEGNRTNAVLYEAFIKMFEMEGHEFDFSKSSALKIQETISSFFSAFGISTDILHFNALLDGNSFDKQPAYEFWHLLYSYEGDDSATGNETLYRLLESKFGFKREFAQILANVSFQDDYGSLSSKAIRKIMPFIQENKYNEACALAGYNHSLSITKEENLNRTLKSKLDILPKNSLRNPVVEKILNQMVNVINAIILDSSLGKPDEIRIELARELKKNAKERAELSQSINDAKNNHDKIFKELQTNFSIKNPTRNDIIRYKLYQELASNGYKTLYTNTYIPKEKLFSKEFDIEHIIPKARLFDDSFSNKTLEVRQANIDKREETAYDYVSNSLGTEALQQFVSRVESLYKEGKLSKAKYKKLLMKGSEIGEGFIARDLRESQYIAKKAREILLEICRSVVSTSGSITDKLREDWGLINIMQELNIEKYRAQGLTEQIEGKDGNVKEKIIDWTKRNDHRHHAMDALTIAFTKHNHIQYLNNLNARKNETNKKHGNIIAIEQKETYKDENGKRYFNLPLPNFRSEAKKHLEQILISYKTKNKVVTRNKNKIKGSSKVQIALTPRGQMHKETVYGKIQQYATKEIKIGPSCDIALLNQIANKKYRDAVLNRLQQFDNDPNKAFGGKNALTKNPILLVPDKPMPEKVKIVVMEDLYTIRKEITPDLVIDKVIDVQIKRILQQRLIEYNNDPKAAFSNLDKNPIWMNKEKGISIKRVTISGVSNAEALHYKKDHTGKPIFDAEGNYIPADFVSTGNNHHVAIYRDESGNLQEEVVSFYEAVARVNAGMPIIKKQHENGWQFLFTMKQNEMFVFPSTNFDPTEIDLLNPDNYHLISPNLFRVQKFSKVIYGNSAVRDYVFRHHLETTINDNKQLKDIAYKSIKSLSFFERIIKVRINHLGRIVQVGEY

SEQ ID NO: 23841 - protein, 1461 aa, unidentified
  REGION 1..1461: note = Cas Enzyme sequence
MKKILGLDLGTNSIGWALVNEAENSKEQSDILKLGVRVIRYDNFTNAEGKELKGDADNFFKIGKSVTPNANRTQSRGMRRNLQRYKLRRSALIFILKKSGIITDDTILTENGNKTTFETYRLRAKAASEEITLEQFARVLLQINKKRGYKSNRKTKSEAEGQSIDGMNVAKNLYKNDLTPGQYLLQLVNEGEYSKLEFYRSDLQAEFDKVWNTQMHFYPNILTDNLKEKFIGKNKSQTWAICQKPFNIVGIKRTTKGDEQRKEILTWRSDALTKKMNLEELAIVLQEINGQINSSSGYLGAIGDHSKELYFNHLTVGQYKMAELDKNPNCNLKNQVFYRQDYLDEFECIWEKQAKYHTELTPELKTEIRDCVIFYQRRLKSQKGLISICELEGKEKEIEVDGKKKVKLVGPRVCPKSSPVYQYFRIWQRFNDVTINGSPLSEDDKNILFAELSIKKELSKKEILKLLYKNAKDLDLNFEKLEGCRTQFTLFNAYRQIVEQSGHGEHDFSKMSASKIMDLVTNVFKTIGISTNILKFDSCAENVENQPLYRLWHLLYSYEDDNSKSGNDKLITKLGELYGFAPEYAKIIANITFEPDYGNLSTKAIRKIMPFMQESNQYSDACIYAGYNHSKRSLTKEQIANKVLKNKLDLLPRNILRNPIVEKILNQMVNVVNGIVDTYGKPDEIRIELARELKKSQQERKDTADAISKNTKERNRIKAILSKSPFNLTHVTEKAVLRYRLYEELATNGYKTLYSSTYVKKEDVLNGELFNIEHIIPKAKLFDDSFSNKTLELKSLNIEKSNATAFDFVKTKYGTEGENSIDKYKTRINKLYKDKIISKAKHDKLLMKEKDIPSGFIDRELRDSQYIAKKAREILEDLVSVVTPTTGSITARLREDWQIVDVMKELNLPKYRELGMTHYDQDSDGRQIERINDDWTKRNDHRHHAMDALTIAFTKKSIIQYLNNLNARIGKSIDDHIDLSNYNFSNIKPEDRTAVEYAIEEKEMHRAEKGKLLFNTPMSNFRSKAKQQLENILISVKASNKVTTVNINKAKNNVETTILTKDGEERKIKGQIVKTPRGQMHNDSIYGSIKRYVNKEEKVGSNFDAKRIATVSNKKYREALLTRLYANNCDATKAFTKKNALENNPIWLNHEHSICVPPKVKTVTLETIYTTRKKLEPALFKDSKGIDIFQKKLDKEKIEFNDSDAKCDTLLNEAIDFIVDKAIQKLIIEEYKKTRKIVDEFNKTANENKKRNVIDETFNHDIWLNQAKGIAIKRVTVTAVNNATALHDKHDQFGEIVLDKNGKKQPSDFVSTSNNHHVAIYCDEEGNLQEKVVSFFEAVARKNQGLPVIDKTYNANLDWQFLFTMKQNEYFVFPNKKTGFDPNEIDLLNSNNYVLISPNLFRVQKLAPKNYCFRHHLDTKTETQKPLNGITYKWQLGLSGIVGIVKVRVNHIGQIVSVGEY

SEQ ID NO: 23842 - protein, 1344 aa, unidentified
  REGION 1..1344: note = Cas Enzyme sequence
MKKILGLDIGTNSIGWALINEKDGVLQNIVGMGCRIIPEKDEHRDFEKGREISKNATRRQKRGSRRLNERYKMRRNNLIKLFNVLEIVPSGLERLFEKIRYDSNKIIMPQGAFQKKDKQFKPHELYELRNRALKEKVSLEELFRIIYHLNQRRGFKSNRKAYNEEEKLDIDILDEKEKKADITYEKVKIASAEPTGERKGKQKKEELKVILEDGRYALTDKYIFKKFIGESIILEIKKENIKSTNEIKYSFSFPSKWQRSRKELNDSIVRSGGFPGKYFYEEYIKYKNEGNLYDFKVRENIVNRDLYINEFDSIWNAQYNFWKNEGVDIDFLPKFRIAIDSIVPSHNKDEKQKWYQKGLGAFIKNYIVYYQRDLKSQTKTIGDCQFEEKFYSVVDKETGEEIITRNGPKCCPKSHPAFQEFRIWQQINNLICYNNKEEVIPLDYSNKVILFDYLNERDTADKKQIEKELKKHLEDFSSTNIAEGKSWVGNKTMYFFRKIFKKYNYDGSHLLSDIQLYLRMWHLLYSVGNEKGIKNGLKKLDSNMSDEVIELLCKVDYKEKDYASLSLKAINNLLPLMRCGKYYSESNLTEKIISKITMFLNNELDDEFDPKTLERLKTRKGLTEFQGLSYFEAASLIYGSHSAKQLDKYNSFEEIQIIKRHSLRNPVVEQIVNETLMLVKEIWKNHPDIEDGEIKIELARELKSNKEEREKISNFQVENSKINQLAVEEIRRHKGQNYNPSLAEIEKIKLWNEMNKKSPYTGKVLGISDVLSANTEIDHIIPRSRYYNDGLINKVVCESHINADKGNMTAFEYMTTGTPRQNEKLSYDDFIVTISSLPRGKRRMLTMKEIPDGFIDRQIKDTQYISKRVKEELGKIVGIYNVKSTTGQITDYLKEQWGVAELMRRLIKPRFEILQEKYKINDLVREEDVLDKDGNPTGKKKTVIKGYSKRFDHRHHALDALIVSCTRQGIIQQLNLLNQITKGKIKSIEETIGGNLRKFIPPTGKTDKNAEKFYSIVEEAIENIIVSYNSRKRLVSKGVNWFQKFNPEKNRIEKVKQDENNNKGRAWAIKGQLHKETNYGIYEYNGELRHISKCELINLTPNKISNIPDDKLRNEISNHINNSDYNGDIKKAFGPEGIIEFNKNRTIPVYSVRVMEDGKVGEVKGKIPLYTPERKLEVEKGGNFCVVFYEHPETKERKFDTVSFIEAVQLKTSGENPYVTDKGLEYQKQGYKFIFTLTHNNLVYVPTPDEIISHIDWDSKNKIFDRIYRVVKFTDCTIYFVPHNYSKEILVHEGKAKNASQHKGEFGFNTGGTQYFKDSKNLIRNICIKLNVDRLGNIKPYFND

SEQ ID NO: 23843 - protein, 1526 aa, unidentified
  REGION 1..1526: note = Cas Enzyme sequence
MKTILGLDLGTNSIGWALIKQNFENKKGEISGIGSRIIPMSQDILGKFDSGVSISQTAERTAFRGVRRLRERHLLRRERLHRVLNILKFLPDYYASQIDFEKRLGQYKSNTEPKLVYDEQNQFIFKKSFNEMVAEFKKSQPQLFYNKTNGKETLIPYDWTIYYLRKKALSVKIEKEELAWLLLNFNQKRGYFQLRGEDEAEFPNKKVEFHSLKVIDVTADEPQKGKTDIWYNIILENGWIYRRASKLALFDWKNKIKEFVVTTDLNDDGTDKTDKDGKVKRSFRAPAETDWTLVKTKTEQTIDKSNKTVGQYIYGTLLENPTQKINGKLVRVIERKFYKKELEQILKTQLKYHDELKNLELYNACIEELYEHNEAHRNNIAKRDFVHLFLNDIIFYQRPLKSKKSLISDCKFESRKYIKDGIEQNEALKCITKSHPLFQEFRLWQWIQNLHVFEKENNDTPITEKFLKSEDDFVKLFDFLNDRKEIEQEGLIKFLLSPLNLKPKELKLESAKYRWNFVEDKAYPCNETRALMLTKLEKCTSIPNDFLSKETEEALWHILYSVNDKEEIKSALGKFAHKHQLSNDFVEQFMKHPPYKNEYGSYSSKAIKKLLPLMRMGKYWNEENIHPQTKNRIEKIITGEFDDSIRNRVREKAYKLNDINHFRAFPLWLVSYVVYDRHAEDGNLEKWKTPEDLENYLRSFKQHSLRNPIVEQVLTETLRVVKDIWKHYGYSKENFFDEIHIELGREMKNPADKRKKMTEQVTTNENTNLRIKSLLAEMINFKDVENVRPHSPMQQEILKIYEDGVLNSGIDIDEDILKISKTAQPNKADLLRYKLWLEQRYKSPYTGEIIPLNKLFTPAYEIEHIIPQSRYFDDSFSNKVICESEVNKDKDNCLAFEYISNNEGKKIELSVGKFATLFTTEQYEQFIKTNYAKNYSKGKKLMLLDIPEKMIERQMNDTRYISKEVKNLLSKIVRQQNNDEGTTANNLLSTNGQITSALKQDWGLNEIWNELIAPRFERLNEMTNSRNFGDINPNTNKFLPTVPLELQKGFNKKRIDHRHHALDALVIACATRNHINYLNNQNALDKDKKKGQETREDLKRTLCDKKYNADSEKNYRWIFKQPWDTFVLDAKHSLDTTIISFKQNLRVINKTVNKYESYKNEDGTLRLDENGKPVKDIIKQIKGDSWAIRKPLHTPMPYSENKYQFDFLKISENLGKTSLIINLEIKDKVISLLNSNGNKIGLVQKILKSNPIVANNGKTVIETEYKINNTKFRKRKPITDLANRSSQGGITSLDAMLKILNKIYDFELKKQLFKHLEINGNDIDKAFSIEGIERFNELRKIPVYKLPIAESSSEKFRISENNRKRHMFFEAEKGTNLFFAIYKDEIGKRNFITIPFNEVVESQKQSATLNQKPQSVPLKNEKGEDLVFHLSPNDLVFVPSKEEIENPNLVDFNILNKEQVNRIYKCVSFSGADCFFVRNDIASSIVNKVEFSTLNKTERSFEGTQIKSCCWKLGVDRLGNITKVIK

SEQ ID NO: 23844 - protein, 976 aa, unidentified
  REGION 1..976: note = Cas Enzyme sequence
RALYQEEKELLAEELSLRKELKKTDVLKLLFDNPKELDMNFNSIQGNLTQAALFEAYKQIIELSGHEIDIEKKSANEILKVVEEIFSALGFNTDILYFDSSKPLDKQPMYKLWHLLYSFEGDNSKTGNENLIDKITELYGFDKESAKILAKVTFQDDYGSLSAKAIRKILPYLKAGNKYDVACQYAGYRHSASSLNREELNAKNYKDHLEILPKNSLRNPVVEKILNQMINVVNSIIDTYGKPDEIRIELARELKKNAKEREELSKSIAETTKLHEQYKAILSKPPFNLSYISHNDIVRYKLYEELKENGYKTLYSNTYISPANVFSGDFDIDHIIPQSRLFDDSFSNKTLELRSINIEKGNKTAYDFIKDKYGKVGGENSLDNYLIRIEDLYKKGIISRAKYNKLKMQEKDIPEGFINRDLADSQYIAKYAKTMLGELVKFVVSTTGSITDRLREDWQLVDVMKELNWEKYNSLGLTEEFMNEGGQRIRKIKDWTKRNDHRHHAMDALTVAFTKRQFIQYLNNLNARRINENHGISNTEKEEQDNVAIGAEDVPLSTRDVLGIERKYLYRDNKNKLRFVPPIPLDEFRAEAKRQLENTLISIKAKNKVTTKNINITKKKGGVNKKEQLTPRGQLHNETVYGSHKEYVVKEETVNAKFDSEKIATVANPAYRAALTERLQQFNNDPKKAFTGSNALSKKPIWMDELHTKKVPEKVKTVSFEIVYTIRKDISPDLKVDKVIDKKIRQILENRLKEFGGNAKQAFSNLEENPIWLNKEKDISIKRVTIYGVNNVESLHDKKNKEGKLILDENGNKQPVDFVNTGNNHHVAIYRDAEGNLQEKVVSFYEAVNRRNLGLPVIDKNYKSDEGWEFLFSMKQNEYFVFPNEKTGFNPNEIDLLDPDNYSLISPNLFRVQKISTKNYLFNHHLETKAIDGETLKNKKELRGITYYFIQTPSKLQGIIKVRVNHLGQIVSIGEY

SEQ ID NO: 23845 - protein, 1533 aa, unidentified
  REGION 1..1533: note = Cas Enzyme sequence
MKKILGLDLGTNSIGWALTNNDFDNKLGNIEGLGSRIIPMSQDVLGKFDSGVSISQTAERTKYRGTRRLVQRFLLRRERLHRVLNILDFLPQHYVEAIDFDKKFGQFKPEKEEKLSFYKNESGKNQFLFLESHQEMLAEFQLTNPDLKQVPYDWTIYYLRKKALTQKISKEELAWILLNFNQKRGYYQLRGEEQEENKNKLEEFHTLAVVDVIEREKGKSGVWYNVILENGWIYKRESKIALLDWIGKQKNFIVTTELNDDGTIKLNKDNEEKRSFRSPKEDDWGLVKIRTEQTINQSEKSVGTFIYDALLKNPNQKIKGELVRTIERKFYKDELSKILKAQIAFHNEIFGDRNLYTKCIDELYKHNDSHKNNIKDKSFEYLFLEDIIFYQRPLKSKTSLISDCSLEFAPIKDKKGTLVKDSNGNQVVKPLKCIAKSNPIFQEFRLLQFVKNLKIYKKEIVNDVDVTNIYLKTEEDLVELFNWLNDKAEISQKQFLAYPKFKLKEDKYRWNFVEDKIYPCNETRNQFLNAIAKIDVDKSFFDTKNAQDLWHILYSVTDKIEITKAITTFAKRHNLPDKFIANFSKLKPYKRDYGSYSEKAIKKLLPLMRFGSYWKESNIDIKTFARIDKIQTGEFDENMRTRVREKAIHLSKTTDFQGLPLWLASYIIYDRHSEASDVSKWKTPADIAWFLNPKNKSGFKQHSLRNPIVEQVITETLRVVKDIWQHYGEGKENFFNEIHIELGREMKNNAADRKRITDNINQNENTNLRIKAILTELKNDGVNDVRPYSPSQQEILKIYEEGVYSSEIKKEKLEEIDKIRKNAKPTPSEIIKYKLWLEQGYISPYTGKLIPLSELFTTKYQIEHIIPQSRLFDDSLSNKVICESEVNELKSNMTALEFIQKNEDRIVTLTGGKTVKIFTKDAYRKYITAYYNKNKNKQKRLLSEEIPEKFIERQLNDTKYISKIIKNLLSKIVREDDEQEVTSKHIVSLNGSITSRMKQDWGLNDVWNNIITPRFERLNALTNSSDFGKIELKKDEFGNKGKQVFQTTVPDALAKGFTKKRIDHRHHALDALVIACVTKDHINYLNSINSERTNYSLVSKLRRTEEIVINEKKQKIAKEFHKPWDNFTKKAEDQLDRTIISFKQNTRVINKTVNKYQAWKEEDGAMKKVTLKQTKGDNWAIRKPMHAETVSGKVFLKRIKQSHITIANAIEQIELIVDKEVKKQLTEKIKQYPNNLVGLKKHLKAFPVMIDGKTIDKVQVYETIEATATRKTLDNSFDEKKIEKITDTGIQKILLTHLKQEMYQNAMDENGKKIPAHEIAFSENGLEELNKNLTALNNGKKHQPIKKVRVFEEGGKFSLGNTGNKTTKYVEAAKGTNLFFAIYQDEKGKRNYKTIPFNEVIERQKQGLSAAQETDENGNRLLFTLSPNDLVYIPTEDEKENLTTVNFDKLSKEQTERIYKFVSCTGGEGHFVFNNYSKEIISNENGSNNKNERMLDFKNSNTIYDEKEKPIMIKSVCWKLEIDRLGKIKKIIR

SEQ ID NO: 23846 - protein, 939 aa, unidentified
  REGION 1..939: note = Cas Enzyme sequence
ANKITELLGYKTKDWELNYKEVEGNRTSQALYEAYLQILELEGYDEDLFKIAGKDEIKLADINTSSNEIKNMVKTIFETLGIEVSILDFDAEIYGKAFEKQSSFQLWHLLHSYEGDDSNSGNETLYALLNRKFGFKKEHAQILANIIFASDYGSLSAKAMRKIFPYLKENNYSESCKLAGYNHSSSVTKEENEKRPLKGKLELLKKNSLRSPVVEKILNQMVNVVNAIIEDPSLGKPDEIRIELARELKKNSKERAEMTLNINSAKIENEKIRKLLSQEFGVKNPTRNDIIRYKLYEELKGNGYKDLYTNTYIPQEKLFSKDFDIEHIIPQAKLFDDSFSNKTIVPRQVNLDKGNQTAYDFVLGKYGAAALDEYLLRIEMMFKQKEGSISKAKYQKLLKQGKDIGDGFVERDLRETQYIAKKAKQMLEEVCRKVISTTGNVTDRLREDWGLVNVMQELNFEKYKTIGLTELVEKKDGTFKERIKDWSKRNDHRHHAMDALTIAFTKHSHIQYLNHLNARKDEDNKLHNHIIGIENKETELVIEDNGNKKRRFKQPITNFRLEAKKHLESVLISFKAKNKVVTKNKNKIKSKNGEKVKIELTPRGQLHKETVYGKLQQYVTKEEKVGAKFNEEIIKKVANKKQREALMQRLTEHAGDSKKAFTGKNSLDKNPVYLDEQKLQVVPDKVKLVFMEADFAIRKDITPDLKIDKVIDAGVRAILQKRLDEHNGNAKTAFSDLDKNPIWHNQEKGIRIKKVRISGVKNAEALHSKKDHLGNDILDANGKPNATDFVSTGNNHHVAIYRDAEGNLQEKIVSFYEAVERVNQGLPVIDKKYNESLGWEFLFTMKQNEYFVFPSPSFNPTEIDLLDARNNKLISPHLYRVQKIATKNYFFRHHLETNVDEQKELKNIAYINLQSLPHLSKIVKVRINHLGAIVKVGEY

SEQ ID NO: 23847 - protein, 1462 aa, unidentified
  REGION 1..1462: note = Cas Enzyme sequence
MKTILGLDLGTNSIGWALIKSDFSEKKGEILGMGSRIIPMTQDIKDEFGKGNSISQTADRTRLRGVRRLIHRTLLRRERLHRVLNIVGFLPEHYANQIDFEKRFGKFNSDTEPKISFNGNQFLFELSYQEMLADFKIHQPKLVSNGKKVPHDWTIYYLRKKALTKKIEKEELAWILLNFNQKRGYYQLRGEEEEETPNKLVEFHSLKIVEVKSDEPQKGKSEIWYSLILENGWIYRRASKTPIYDWKDKTREFIVTTDINDDGSVKVDKEGAEKRSFRAPKPDDWTLLKKKTEYELGNSGREVGTYIYETLLQKPNQKIRGKLISTIERKFYKEELKKILKTQLEFHQELKNENLYNACLEELYQNNEAHRYLLSNKGFEHLFVNDILFYQRPLRSKKSQISNCTLEKRTYIKDGIEITEGLKVISKSNPIYQEFRLWQWISNLNIYRLEADEINVTSTFLNSHEDIEKLFDFLNNRKDIEQKQLLKYLLENQGFKGKSLTVETDNFRWNFVADKKYPCNETGSLLRTRLSKVKNISPDFLTNRIEQHLWHIIYSVTDKIEYEQALKTFARKNNLDVDSFYEQFKKIPPFESAYGAYSEKAIKKLLPLIRLGKHWDWEAIDSGSKERINKILTGEYDENIKTRVREKSLHLRSENDFQGLQEWLAKYIIYDRHSEADVAEKWYSVSDLETYLKEFKQHSLRNPIVEQVITETLRVVKDIWTKHGKGVKNFFDEIHVELGREMKNNSDERKRLTNIISENENTNHRIKLLLMEMMNDNEVENVRPYSPSQQEILKIYEDGVLNSFADVDDEILKISKKAEPTKSELQRYKLWLEQKYRSPYTGQVIPLNKLFTTEYEIEHIVPQSRFFDDSFSNKVICESAVNKLKDNQLGLPFIKNHPGEKVQIGFGREIQVFSEEQYLDFVKEHYSKNRSKHNKLLLEEIPEKMIERQLNDTRYISKLVSSILSNIVRSEKDDDGLNSKNIIPGNGKITTELKRDWGLNDVWNDLILPRFERMNALTNSDLFTTYNEKHQKHLPTVPFEYSKGFQKKRIDHRHHAMDALVIACATRDHLNLMNNQSAKSDLKRYDLQNKLRKKEPYFNQKENKQKDAFKDFIKPWGTFTEDSKNALEKIIISFKQNLRVINKATNSYESYKDENGNLRIGKDGKPEKGLVKQTGTNWAIRKPMHKDTVSGRIELTRIKMSKGSILTATRKSIDATLDLKTIEKITDTGIQKILLNYLASKENPELAFSPEGLEEMNNNIEKYNDGKFHQPIIKARFFELGSKFSLGQTGNRKDKFVEAAKGTNLFFAVYQDENKKRSYETIPLNEVIEHQKWRASLTKEEQDNIPMIPVKNAQGTFLFSLSPNDLVYVPTNDEMENASSLDFSNLSKEQTKNIFKMISSTGSECHFVHFSIASLIKNYDAKSKIGELGSLNKLETTLNNTIRIKEKCIKLKVDRLGNISKA

SEQ ID NO: 23848 - protein, 1395 aa, unidentified
  REGION 1..1395: note = Cas Enzyme sequence
MKKILGLDLGTNSIGWALVNEAENINERSSIIKLGSRIIQYDNFVSTITGKESKEPEKDFKSGKGISPNAGRTKNRSMRRNLQRFKIRKENLLEILKDKNFISDETILSENGNFTTFETYHLRAKAANEEISLEQFARVLLMINKKRGYKSSRKAKSQDEGQLIDGMAIAKKLYEENLTPGQFVLDILKSGKRFIPDFYRSDLQSEFIRIWNFQKQFYPEILTDSFKIEIEGKGQRATSAIFWKTYNFNTAENKGTREEKKIQAYEWRTKALNTQLSKEEVAFVLAEINNNLNSSSGYLGAISDRSKELYFNKQTVGEYLMAQLDINPHTKLKNQVFYRQDYIDEFEKIWEMQAKFHSELKKELKNEIRDIVIFYQRKLKSQKGLISFCEFESKQIEVEIEGKKKIKTVGSKVCPKSSPLFQEFKIWQILNNIQVSDKSGNGKRFLEQEEKEILFNELNFKDKISKNECLKILFKNHKDLDFNFKENIEGNRTYFSFIVAIQQIIEISGHGEYDFSKMNTDEIFNIINPFFEGLGYNKNLLKFDSQKEDKEFEQQAFYQLWHLLYSYEDDNSNTGDEKLIIKIKEKYGFEDEYSRIIANIPLQADYSSLSSKAIRKILPHLIDGFAFAGRNEKENEPSACELAGYRHSKSSLTKEEIENKVLKEKLNILPKNSLRNPVVEKILNQMINVVNSAIDTYGKPDEIRIELARELKKSAKEREEATKTINQTTLNHEKYREILQKEFGLTHISRNDIIRYKLYIELEPCGFKTLYSNTYIPHEKLFSKEFDIEHIIPQSRLFDDSFSNKTIESRSVNIEKGNDTAFDFINTKYGEIGIEDFKNRIEELFKSGKLSKTKYNKLKMKGDEIPSDFIARDLRDTQYIAKKAKTILEDLVKDVVSTSGSITDRLREDWQLIDVMQELNWDKYNKLGMTEIIENKDGHKIRRIKDWTKRNDHRHHAMDALTIAFTKRSFIQYLNNLNARSDKSGSIYGIETKELYRDDKGKLKFKPPIPLHDFRAEAKKHLENTLISIKAKNKVATININETKKTHGTNKKKQLTPRGQLHLETVYGSQQQYVTKEEKVNASFNNELINKVANKKYRDALLKRLEEFENDPKKAFTGKNSLDKNPIFTNILQTHKVPEKVKIVWLDTIYTIRKDITPDLKLDKIIDKKIKLILEERLKAFDNDSKKAFSNLDDNPIWLNKEKGISIKRVTITGISNAVALHDKKDKEGSFILDKDGKKQAVDFVNTGNNHHVAIYKDEYGNLQENVISFFEATQRINQGLPIIDKTFNNDKGWQFLFSMKQNEYFVFPNEKTGFNPLEIDLLDPENYHLISSNLYRVQKFTIKDYFFRHHLETNVENNNSLKGITWLRLGLNGINRIIKIKVNHIGQIVSIGEY

SEQ ID NO: 23849 - protein, 1087 aa, unidentified
  REGION 1..1087: note = Cas Enzyme sequence
MGQISAKAIRKLLPLMKIYSENETIKYNYKIKEKIDLLLQENRYEIEKNIPIEERLFNLREYISDAKARKRLSTYTNISHFSGLSYWEAAAVIYGQHSSQDSKKPEETNIEKLFETVKRNSVNNPVVEKIVNEAIKLCKEIYLKYGFDEVRIELSRELKASREEREQMWEGMNNNASKNERAKMMLRELMNDEHHSQSNLDTTNTSNINKIKIVEDVVAQIMGKAHEEKVKEYQIKEPSKADIKRYICWLEQNFKCPYTNQPMPLTDVFSRDGRVQIEHIIPKERYRDNSYSNIVITWKEINEAKQKNGNRTAYEFIVLKRENNTSITLANGRTVDLVPSEKWEEHVKTMFPKGRKQMNLLRKSIPEDPINRTMKDTQYISVLMKEKLGKIVGADKVWTTTGAITDMLRESWHLTEIMKELVRDRFENFFVPMGSGSDPIAQKINYFSERIDYETGEIANFEVFPLKTGESIKRLDNRHHALDAIIIACTKQQHIQYINSLNAQYLANQDNDEEKKRKYNSLKHSICVGESVNKFKTPWEKNVFLPQIKEALINLIVSHKNTTLLLSPTRHKDKNNLQPAFSIRGKLHKETNYGTMKLRKLKFFKLEDAKAYTKSLPDKEKKEFLSKNNWQFRPIDIGKISNPQLKIIIEDWLLNNDSNLRLAIQNLPLYKSEPLKFVTIYETNYTTNNPITKTTGIYDERILSKILYLNNFKAKIKKEITDIQNEYRKLVISTELYQNVIYDVRIVENKIVKWVELKNLDDQLLEKIDYGKTKKQRERKEKIVVILKNRLFQNDGNFKKAFEDVFTKNNLILLNESLLPTSIKTVRAFANTDDKMFEVKRKLKNGNSTFVELGNNFMVYVFGKVDEHREHRVNSKEREWDLLSFFDAFQEKIKTGKTIEQLYKKENIPEGYRQIFTLSNNSDVVFIRPQSNGKYKEYEESDLKDLFDWTVPDNNDLYRVKIIEERKKEVIKNLWRVTQFSKAGNSSINFRKLNIAKSLIIPPSELNIESFTDDKVKDKIITEINKIRNETEEKKAKSLEENIIPYNKELFENCIKVFVDKLGKRVVPYWEFKDGCWNNADARKLGF

SEQ ID NO: 23850 - protein, 1239 aa, unidentified
  REGION 1..1239: note = Cas Enzyme sequence
MKKILGLDLGSASIGWAVIAENIENGKTKCDILGMGSRIIPYEGSEGKDFAKGTGESRNSLRTKARTARKGYDRYQLRRKYLVDTLIKNQMYPDDVIRSLPKMKLWELRDKAVHSPVSLLELGRLLLWLNQKRGYKSSRSDANLGKKDTEYVATVKSRHEKIKELDLTIGQYFYRELSANEFFKVKENIFPREAYIEEFDTICKTQQIEHPSILTNELIGKIRNEIIYYQRPLKSQKGLVSVCEFEGFWRVGKDGKEYFVGPKVAPKSSPLFQLSKMWENINNIKIGSRTGDDMRLTTEQKWAIFQHLDNNEKLTTTDLLKILSLKKEDCYVNKQLAKGLNGNITKQAIRQCLGSSDKYENLLKLELKVVENCLCDKITGEIFDDILIKFIDPSVEKEPLYQLWHTIYSIHDQEICSMVLQAKFNIEQPIADRLAAIDFSKHAFGNKSAKVIRKILPYLMEGDGYSEAMSYAGYDHSNSQTKEENLQRKLLELLNPIPKNSLRQPIVEKILNQMVNVVNAVIEKYGKPDEIRVELARELKQSKEERKDAEKSMNQRQRENDAITKRLEEFGLRATRNNIIKWRLYEEIDNQEKRLNAICVYCGQPISLIEALKGNDVDVEHIIPKSKLFDDSQSNKTLAHRHCNKNKNDLTAYDFMKGRPEAVFNEYVERVNMLYASRVIGKAKRDKLLMTESKIPDNFIDRQLRETQYIAKKAREILQTICHNVWSTSGTVTAELRHLWGWDDVTMNLQMAKYRELGLTHQVEWESEHGKNKHEKEVITDWTKRDDHRHHAVDALTIACTKQGFIQRFNTLSAAKTREDMIFDVEQRSLEFREKRSLLEKYIIGEQPLSVDEVEKAVASILISFKSGKKVAVWGTRKIGTRGNKNIVQEKIIIPRGALSEESVYGKIKVQEANKPIKFLFENSQSIFNPNIKAKVEERLLMFEGDIKKAIASLKKVPIYLDNEKTVVLEKATCLKDEYVIKYAVDINFNKVDKVVDPKIKEILLNRLKKFGGKEKEAFKDVQLEDKTVIKWYKDEAQERPIKSVRCFTGLSAVVPVKKDENGNDIGFVKPGNNHHIAIYTDTEENKQQHVCTFWHAVERKKYGVPVIIKNTNEVWDKIQSQPEATYPESFLEMLPHPNLNLIVSIQQNEMFILGMTTEDIKTAIEQHEYSLISSGMYRVQKLGSGDYTFRHHLETQVVDDVNTVLSKRGQRIRSIGSLFALNPHKVRIDNLGDIVTKE

SEQ ID NO: 23851 - protein, 1097 aa, unidentified
  REGION 1..1097: note = Cas Enzyme sequence
NLRRGYKSSRKDQTDSDEKKQSEYLNEISGREAELDEKHQTIGQRFATGLSDSSNYRVRQQIFNRSTYIEEFDLIWEIQANHHPKVLTESNRRLLRDKIIYRQRPLRSQKGLVGECALEGNFALDKNQEQIIQPNGLPKIVRPKSAPKSSPLAQECKVWESIHNLRINDERGDRYNLNDTQKQQIFDDLQQKPKNLTANSLLKEILKLSPKTYSVDVLIKEKGLESNRTRAKLLTIFQEVGINRRDLLEFDPEVEVKEWDNPDTGERINRIQLRGNFDQQPLYKLWHLIYATQEVNDLIRLLQERYQFTEKQAQALAEIDFTKEGYTNKSHRAMRRLLPHYRKGLDYTEACKAAGYNHSNSLTKSENEGRTLLNKLDVLPKNSLRNPVVEKILNQMIHLVNELIVVHGHPIEIRVELARELKQSAKERQGVDKRNNSRKKEHDRIRKYISEDLGIQPESVTKVQIDKWKLYEETDGISLYTGQKLDRATFLRAEAVDVEHIIPKVRRFDDSFENKTICERKLNQDKNKSTARDFMESQPVSGLQSYEAYLRMIKDLADKGSISKAKYNRLMMTAENVSNDTEFIARQLRKTQYITKKAKELLLDICHNVYCTSGSITDFLRHQWGWDEVIQDLRLPQFRELGLTEIKKIRRGEQDKEVIKDWDKRKDHRHHALDALTVACTSQSHVQRINKLNQTLEGKCGQARRQSLLSAGRDKYIAGSAPFSHAQVCSVIDDVLISFKQGKKVATRSRNTPKGSKKGEQLTLTPRGSLHEETIYGRIHRYKKVPLNDRFDLTLLNEMPHMQQRELVEGRLAAHENNPREAFKDLDKKPIFYGKNNEKKLTKVTVWEYKLVSRKAINPNFTEKSVSKIVDPVVRQAIQARLKTGGGTSKEAFKNMGIDPIQVNQLPVKKVRIFNPAEKFVTLPRGFVEPGSNHHIAIYRDAEGKKQEHVVTFWDAFLRVRLGLPPIITNVEAAYAFIEQSVNNIPNDLHLPGSPDWEFVTSLAINDMFVFDLDPNDLDYKDRQNREKISKKLYRIQKLSSGIFVFLHHLETNVLEQSDYNKPDGRGKRCSLGSMIGAVKVKIDRLGYLVQTEPPIH

SEQ ID NO: 23852 - protein, 1221 aa, unidentified
  REGION 1..1221: note = Cas Enzyme sequence
MENKKVVGLDIGTTSIGWAVVGELDGEKTQILGLGSRIIPLATDEKNEFEAGNAISKNQKRTQKRTQRKGYDRYQLRKKDLFEKLTELGMMPEPSLFTIPALELYFLRSNTTHEQITLPQLGRILFHLNQKRGYKSSRKDEAKDKKETDYVAEVNSRYEKIKQEKITVGQYFYKGLINDERYRIKDQIFPRAAYIEEFSTICKKQQEYYPEILTDRNIQQLRDEIIYYQRPLKSQKGLVSVCEFEGQWYKNKEGKEIFSGPKVTPRSSPLFQVCKLWETINNITINNKRGEAFVISLEKKKELFNYLDTNKELTDKKLFEILGLGKNDGYYGNKQLSKGLQGNLTKTAIVKILKDQADLDKLIGFELSIESYEKVDVSSGEVVNRKRITAEVEKQPLYKLWHILYSIPEEKDIIKKLSHDFNLSEDVASQLAKLDFTKGGFSNKSAKAIRNILPHLQQGAKYSDAMTLAGYNHSDSITAKENLIRPLKDNLKLLPKNSLRQPVVEKILNQLINLVNAIIEQYGKPDEIRIELARELKQSLDERNNTFRNNTKRETENKAIAERLSKEYRVKANRRNIEKWRLYEQTDGNCLYCGNKIELSDFLNGDESDVEHIIPKAKIFDDSFQNKVISHRKCNKAKDNLTAYDYMLTQSTEQLNRFEEAVAQLFKDRKITKAKRDKLLMTEAKIPIDFIARQLRETQYIARKSREILQEVCRNVWATSGSVTEKLRKLWGWEEALMHLQLEKYKAAGKTEWVEFENNGQKHKKERIIGWTKRDDHRHHAIDALTIACTQQGFIQRINTLNSKHTRDEMLAEVKDQVYKEKLTLLEKSLLTKRPFDTAVIETHASQILISFKSGKKVATLGKRKVKKNGKSILKQEGIIIPRGALSEESVYGKIKRRKYQTVKLSSSFTDVDSIVNKTHKALIKQRLAESDNDPAKAFKALSKNPIWLDNSKTNALTAVEIMTFKDEYVIKYPIGTLTVKDLPSIVDNGVRKAIEKRLAEHNNNPKEAFKDLENKPVWFNEEKRIPIKTVRCYTGLDAVAPVNFNDAKKAIGFVKPGNNHHIAIYVNKEGKKVEHAVTFWDAVERKMNNLPVVIRNPKEVWDAVLSEKEKYTQDFLNKLPEDGWTYLTSMQQNEMFIFNLSNEALNEAVQTKDYKLLSENLFRVRKITEGAYWFNHHLETEPKESLDDKKAKRCVQASLSSMSGIKVKLNALGQIVRIGD

SEQ ID NO: 23853 - protein, 1207 aa, unidentified
  REGION 1..1207: note = Cas Enzyme sequence
MKTILGLDIGVSSVGLSVIQENEYEKTIKEMAVRIIPEDPNFHGKFYSGNTASKNIDRTTDRGIRRGNQRFKQRRDKLHAELIANNMFPNDTLFNLTALELYGLRAKAIQEKLSLEELGRVLIHLNQRRGFLSNRKSATEEENSTDYKKRLAELENELGNETIGQHLYNELLNTKSPLQILLRERTYLRASYIEEFDRIWECQKQYYSTLLTGGIHEDDNKGTLYNTFRNNILFYQRPLKSQKGLVSNCSYEKHHKAINKSSPYFEVFRIWQRLNDLAWKLPNGENVLPTLAQKNILFEKLFFEVEQKSKFKLTVSVIKKALGFSTRENIYLNFTELDGSRTYSMIKNALQKADVKDFKKYLFFNYQNIDEKGGLLELWHILYSLPTETEIVNTLAKRFGFTIEQAITIAKEVGFNADYGSLSTKAIKKLLPHLEKGLQYNVACDEVGYDHSGYKTTIDLQNKLEAIKQNSLRNPVVEQVLNQVVNMVNLAIDKHGKFDEIRVELARELRNNAKTRKNITIQNSKNKKWNDEIRARLQSEYDFKIVNGRDIQRYKLWEETNHLCLYCNNPISKTDFLNGNGEIEHILPKSRSFSNNMNNFILSHSKCNSGQDGKNQMTAYDFMSSKSKEQFEAYVEKVNNLYNDGKGKISKQKFEMLMCKGEDIPSDFVERMKKDSQYIAKEAVKMLKKVCENTYTTTGQITDFLRDKWKLKEVLQEVTIEKYRAIGQVETKVLKDKEGGTKTYETIKDWSKRDDHRHHAIDALICALTDQKIIFKLNNLNKLYQYERNLLSNEERTSIEKIISDEIEPAKKFDLKNFADISDTWFDEPIKDLRNIAKVHLDNIFISIKKSSKVLSKTINTPKNGEQQTTWVPRGRLHEETVMGQVKRIGEKKVKLNEKFNDLENIVNAEIKNYLKEYLLAFNNNIQDAFNIKQLKKTPLTYKGKELNEIAVYELVCTKRVKITDNVTSAQLEKITDKKIQKILKDRIEEHKGKIKEAFSNLEVNPIWLNKEKGIQIKSITVYDESKVEKIRNGFVKTGSNHHALIYKNEEGKYIDKVISFWEAVEIGKLNIQQKGKPYPIINKNDDNLLGKFHFSMQINDLFVFDLKHSENPKEDNEINFLDVKNRKLMSTKLFRLQAMTKKSNNQFVVDFRHHLETQTLRKINGKGIDELPLKSIIWEQISKNSDISRLTKIRINQLGDIIKIGE

SEQ ID NO: 23854 - protein, 1269 aa, unidentified
  REGION 1..1269: note = Cas Enzyme sequence
MTKKILGLDLGTNSIGWALIEIDENGTPIRIIAMGSRIIPLNSDDRDQFQKGQAISKNQDRTKTRTQRKGYDRKQLKKSDLKKILTKLNIFPTGELMRLPSLDLWKLRSDAAAENTDISAEQLGRIFYMLNQKRGYKSARSEANQDKKDTEYVTEVKGRYAQLKDKKQTLGQYFYDELLISDQNDKYFQVKKKVYPREAYIEEFDAIIKVQKEKHSFLTNEVIASLRNEIIYYQRKLKSQKGLVSVCEFEGFKTPYVDKDSLKQKLTFTGPKVAPKTSPLFQLCKIWEIVNNISIKIKTPEGSKYKWEDRIPSFEEKKKIVDYLWKNSNLSFPKLIEILDLNKEHVYVNKQISKGLQGNITYTEIQKIIGDSEHLQFNINTIPSKHTSILVDKRTGEILTEEKSLQLNPNLEKEPLYQIWHTIYSIKDLEECRSALIKRFQLDNETAEKLSKIDFNKQAFSNKSNKAMRKILPYLMNGFDYSQSCRLAGYNHSNSLTEKEKASRITDERLELLSKNSLRQPVVEKILNQMINVVNAILEKYGKPDEIRVELARELKQSKDERNDTDIQNGLNKKLNDEISIRLKELGLPTTKRYIQKYKFIFPSRDKKLKEAQVSNQCIYCGELFNLTEALSGDDFDVDHIVPKSLLFDDSQTNKVLVHRICNSNKNNQTAYDYILKKNGAKGLNIYLDRVDDWFKRGIISYNKMQRLKVSFEEYTERKKQKKETESDKKLWENFIDRQLRETQYISRKSIEILQKICNNVTTTEGSVTAKLRDLWGWDDVIMNLQLPKYKGTGQTTVKEWTSDHGKRKHEKEEIINWGKRDDHRHHAIDALVIACTKPGFRQRINTLNASEVRDEMNKKVEEAAIVYNEKLTLLEKYLVTQKPFSTGDVEKEIDKILISFKSGKKVATKGVRKIKVNGKKKIIQKDIIVPRGALHEQFVYGKIKIRDLNKPIKYLFENSDNIIQNEIKHLVKNRLFENQNDIRKAISTLKKNPIYIDKQKEKILNSASCFKDEYVIKYKIQELKAKDVQYIIDKKIRQIVKDRLDAFNGKEKEAFKDVLWFNELKQIPIISVRCFTGLSAVEAIKKNEQGENIGFAKPGSNHHIAIYKDSEGGTFQHLCTFWHAVERKTYKIPYIIKDTATLWNDLLNKNLPQTFLDKLPADKLVLNYSLQENEMFILNLSKELFDEAIKRNDKVLLSKHLYLVWSLSFNKYWFRHHLETKNSELKKIIGARENNRFIEISSVDSFLKLNPIKVRINHLGEITKIGEE

SEQ ID NO: 23855 - protein, 1226 aa, unidentified
  REGION 1..1226: note = Cas Enzyme sequence
MKTIFGLDLGVASIGWAVIAQDLNNQSLNKVLDVGVRIIPLDTNEIKEFGKGGNVPTNVARRMARGARRNLQRFRFRRNILFDCLTDLGMMPDQRLLTQIGPEELFRLRDRALHEPLSLPEIGRILLHLNLRRGYKSSRKDQTDSDEKKQSEYLNEISGREAELDEKHQTIGQRFATGLSDSSNYRVRQQIFNRSTYIEEFDLIWEIQANHHPKVLTESNRRLLRDKIIYRQRPLRSQKGLVGECALEGNFALDKNQEQIIQPNGLPKIVRPKSAPKSSPLAQECKVWESIHNLRINDERGDRYNLNDTQKQQIFDDLQQKPKNLTANSLLKEILKLSPKTYSVDVLIKEKGLESNRTRAKLLTIFQEVGINRRDLLEFDPEVEVKEWDNPDTGERINRIQLRGNFDQQPLYKLWHLIYATQEVNDLIRLLQERYQFTEKQAQALAEIDFTKEGYTNKSHRAMRRLLPHYRKGLDYTEACKAAGYNHSNSLTKSENEGRTLLNKLDVLPKNSLRNPVVEKILNQMIHLVNELIVVHGHPIEIRVELARELKQSAKERQGVDKRNNSRKKEHDRIRKYISEDLGIQPESVTKVQIDKWKLYEETDGISLYTGQKLDRATFLRAEAVDVEHIIPKVRRFDDSFENKTICERKLNQDKNKSTARDFMESQPVSGLQSYEAYLRMIKDLADKGSISKAKYNRLMMTAENVSNDTEFIARQLRKTQYITKKAKELLLDICHNVYCTSGSITDFLRHQWGWDEVIQDLRLPQFRELGLTEIKKIRRGEQDKEVIKDWDKRKDHRHHALDALTVACTSQSHVQRINKLNQTLEGKCGQARRQSLLSAGRDKYIAGSAPFSHAQVCSVIDDVLISFKQGKKVATRSRNTPKGSKKGEQLTLTPRGSLHEETIYGRIHRYKKVPLNDRFDLTLLNEMPHMQQRELVEGRLAAHENNPREAFKDLDKKPIFYGKNNEKKLTKVTVWEYKLVSRKAINPNFTEKSVSKIVDPVVRQAIQARLKTGGGTSKEAFKNMGIDPIQVNQLPVKKVRIFNPAEKFVTLPRGFVEPGSNHHIAIYRDAEGKKQEHVVTFWDAFLRVRLGLPPIITNVEAAYAFIEQSVNNIPNDLHLPGSPDWEFVTSLAINDMFVFDLDPNDLDYKDRQNREKISKKLYRIQKLSSGIFVFLHHLETNVLEQSDYNKPDGRGKRCSLGSMIGAVKVKIDRLGYLVQTEPPIH

SEQ ID NO: 23856 - protein, 1307 aa, unidentified
  REGION 1..1307: note = Cas Enzyme sequence
KENLLEILKDKNFISDETILSENGNFTTFETYHLRAKAANEEISLEQFARVLLMINKKRGYKSSRKAKSQDEGQLIDGMAIAKKLYEENLTPGQFVLDILKSGKRFIPDFYRSDLQSEFIRIWNFQKQFYPEILTDSFKIEIEGKGQRATSAIFWKTYNFNTAENKGTREEKKIQAYEWRTKALNTQLSKEEVAFVLAEINNNLNSSSGYLGAISDRSKELYFNKQTVGEYLMAQLDINPHTKLKNQVFYSQDYIDEFEKIWEMQAKFHSELKKELKNEIRDIVIFYQRKLKSQKGLISFCEFESKQIEVEIEGKKKIKTVGSKVCPKSSPLFQEFKIWQILNNIQVSDKSGNGKRFLEQEEKEILFNELNFKDKISKNECLKILFKNHKDLDFNFKENIEGNRTYFSFIVAIQQIIEISGHGEYDFSKMNTDEIFNIINPFFEGLGYNKNLLKFDSQKEDKEFEQQAFYQLWHLLYSYEDDNSNTGDEKLIIKIKEKYGFEDEYSRIIANIPLQADYSSLSSKAIRKILPHLIDGFAFAGRNEKENEPSACELAGYRHSKSSLTKEEIENKVLKEKLNILPKNSLRNPVVEKILNQMINVVNSAIDTYGKPDEIRIELARELKKSAKEREEATKTINQTTLNHEKYREILQKEFGLTHISRNDIIRYKLYIELEPCGFKTLYSNTYIPHEKLFSKEFDIEHIIPQSRLFDDSFSNKTIESRSVNIEKGNDTAFDFINTKYGEIGIEDFKNRIEELFKSGKLSKTKYNKLKMKGDEIPSDFIARDLRDTQYIAKKAKTILEDLVKDVVSTSGSITDRLREDWQLIDVMQELNWDKYNKLGMTEIIENKDGHKIRRIKDWTKRNDHRHHAMDALTIAFTKRSFIQYLNNLNARSDKSGSIYGIETKELYRDDKGKLKFKPPIPLHDFRAEAKKHLENTLISIKAKNKVATININETKKTHGTNKKKQLTPRGQLHLETVYGSQQQYVTKEEKVNASFNNELINKVANKKYRDALLKRLEEFENDPKKAFTGKNSLDKNPIFTNILQTHKVPEKVKIVWLDTIYTIRKDITPDLKLDKIIDKKIKLILEERLKAFDNDSKKAFSNLDDNPIWLNKEKGISIKRVTITGISNAVALHDKKDKEGSFILDKDGKKQAVDFVNTGNNHHVAIYKDEYGNLQENVISFFEATQRINQGLPIIDKTFNNDKGWQFLFSMKQNEYFVFPNEKTGFNPLEIDLLDPENYHLISSNLYRVQKFTIKDYFFRHHLETNVENNNSLKGITWLRLGLNGINRIIKIKVNHIGQIVSIGEY

SEQ ID NO: 23857 - protein, 1539 aa, unidentified
  REGION 1..1539: note = Cas Enzyme sequence
MKKILGLDLGTNSIGWALTEQDYSEKSGKIIGMGSRIIPMDQASIGDFEKGNSISQTADRTNFRGIRRLRERFLLRRERLNRVLYKLGFLPEHYSCQIDFDHHFGQFLNHSEPKIAYQLNADTGKYEFIFKSSFDEMIGDFQIHQPQLFKNNQKIPYDWTIYYLRKKALTYPIEKAELAWILFHFNHKRGYYQLRGEDEDESKNKQVEFHSFKVVEVLESGDSKSKDEIWYNVILENGWIYRRTSRTPLDWVGKTKEFIVTTELNDDGSIKTDKEGKEKRSFRSPSGDDWTLVKKKTEAEIEKSKLTVGTYIYDSLLQSPGQKIKGKLVRTIERKFYREELKLILDKQQTFHPGLQDKKNYADCLEELYRNNKDHRLTYSQKDFTHLFINDIIFYQRPLKSKKSEISDCRYESRNYIDKEGIKQTDALKCIAKSHPLFQEFRLWQFLQNLSIYQREKYVEGRLYTDVNVTTDFLKSEDDWVALFDFLNDRKEIDQNALLKYPAFNLKKNAELYRWNYVEDKTYPANETRSQIITKLKASNILSDFLTEDVEESIWHILYSVEDKQEIEKALTTFARKHHLPEEFVENFKKFAPFKKEYGAYSAKAIKKLLPLMRRGKYWSEEAISVVTKNRISEIVERLDSIDYDKSKIASITDDDIPKQVLKSFIDCRNPLTSLNTYQACYAVYGRHSEEGEVIKWEVPTDIKHYLKYTFKQHSLRNPIVEQVVTETLRVVTDIWEHYGNGNKDFFDEIHIELGREMKNTADQRRRITSTVTENENTNLRIKALLAELKNDTTVQNVRPYSPSQQEILKLYEEGVLSAVTDIPEEILKISKNAQPTAAELTRYKLWLDQQYRSPYTGEVIPLGKLFTSTYEIEHIIPQSRYFDDSLSNKIICESEVNKDKDNRTAYAYIKEFSGKIIELDFGKRVKLFTLDEYEDFVKNRFAKNRSKLKKLLMEDIPDEFINRQLNDSRYISILIKNLLSNIVREEGEVETTSKNIAASNGSITSKLKQDWGLNDVWNEIITSRFERLNTITNSNNFGQWTNKEGKRVFQTEMPLELQKGFVKKRIDHRHHAMDALVIACASRSHINYLNNESAKSTSKETRYDLKQKLCFKSKPDENGNYKWQFYKPWETFSQDAKQSLFTTIVSFKQNLRVINKTSNWYQKWERQEDGNLKKVLTKQEPGDHWAIRKPMHKETVAGLVQLRFKKIVQLLPALDQWHLIVDKSLKNQIKTLVKQGFDKTKLRKFFKELEDKWDGKEISKIEIYYFEKDMVASRTSVNESYNSAGIKSITDTASQKIMLNHLEKYNETKEGKVIEHPELAFSPDGLDEMNKNIVQLNDGKFHQPINKVRSFEPKGNKFNVGTTGNKGKKFVEAAKGTNLFFAIYQNSEGKRSYESIPLNIVIERQKQGLKPVPEINRKGELLVFYLSPNDLVFIPSEDDQGNENFIDRVKFTSNQENIIYKFVSCTENEGHFVPHYYASPILKNEIGSNNKNQNSIEGVQIKAVCWKLQVNRIGQITAVNGKPILNVEAKIPVSKIDA

SEQ ID NO: 23858 - protein, 1462 aa, unidentified
  REGION 1..1462: note = Cas Enzyme sequence
MKTILGLDLGTNSIGWALIKSDFSEKKGEILGMGSRIIPMTQDIKDEFGKGNSISQTADRTRLRGVRRLIHRTLLRRERLHRVLNIVGFLPEHYANQIDFEKRFGKFNSDTEPKISFNGNQFLFELSYQEMLADFKIHQPKLVSNGKKVPHDWTIYYLRKKALTKKIEKEELAWILLNFNQKRGYYQLRGEEEEETPNKLVEFHSLKIVEVKSDEPQKGKSEIWYSLILENGWIYRRASKTPIYDWKDKTREFIVTTDINDDGSVKVDKEGAEKRSFRAPKPDDWTLLKKKTEYELGNSGREVGTYIYETLLQKPNQKIRGKLISTIERKFYKEELKKILKTQLEFHQELKNENLYNACLEELYQNNEAHRYLLSNKGFEHLFVNDILFYQRPLRSKKSQISNCTLEKRTYIKDGIEITEGLKVISKSNPIYQEFRLWQWISNLNIYRLEADEINVTSTFLNSHEDIEKLFDFLNNRKDIEQKQLLKYLLENQGFKGKSLTVETDNFRWNFVADKKYPCNETGSLLRTRLSKVKNISPDFLTNRIEQHLWHIIYSVTDKIEYEQALKTFARKNNLDVDSFYEQFKKIPPFESAYGAYSEKAIKKLLPLIRLGKHWDWEAIDSGSKERINKILTGEYDENIKTRVREKSLHLRSENDFQGLQEWLAKYIIYDRHSEADVAEKWYSVSDLETYLKEFKQHSLRNPIVEQVITETLRVVKDIWTKHGKGVKNFFDEIHVELGREMKNNSDERKRLTNIISENENTNHRIKLLLMEMMNDNEVENVRPYSPSQQEILKIYEDGVLNSFADVDDEILKISKKAEPTKSELQRYKLWLEQKYRSPYTGQVIPLNKLFTTEYEIEHIVPQSRFFDDSFSNKVICESAVNKLKDNQLGLPFIKNHPGEKVQIGFGREIQVFSEEQYLDFVKEHYSKNRSKHNKLLLEEIPEKMIERQLNDTRYISKLVSSILSNIVRSEKDDDGLNSKNIIPGNGKITTELKRDWGLNDVWNDLILPRFERMNALTNSDLFTTYNEKHQKHLPTVPFEYSKGFQKKRIDHRHHAMDALVIACATRDHLNLMNNQSAKSDLKRYDLQNKLRKKEPYFNQKENKQKDAFKDFIKPWGTFTEDSKNALEKIIISFKQNLRVINKATNSYESHKDENGNLRIGKDGKPEKGLVKQTGTNWAIRKPMHKDTVSGRIELTRIKMSKGSILTATRKSIDATLDLKTIEKITDTGIQKILLNYLASKENPELAFSPEGLEEMNNNIEKYNDGKFHQPIIKARFFELGSKFSLGQTGNRKDKFVEAAKGTNLFFAVYQDENKKRSYETIPLNEVIEHQKWRASLTKEEQDNIPMIPVKNAQGTFLFSLSPNDLVYVPTNDEMENASSLDFSNLSKEQTKNIFKMISSTGSECHFVHFSIASLIKNYDAKSKIGELGSLNKLETTLNNTIRIKEKCIKLKVDRLGNISKA

SEQ ID NO: 23859 - protein, 1374 aa, unidentified
  REGION 1..1374: note = Cas Enzyme sequence
MKKILGLDLGTNSIGWALVNEAEKENEKSGIIKIGVRVNPLTTDEQINFEKGKSITSAAERTKARSARRSLQRFKLRRESLLEILKENAIIPDNFIYSEEGNASTFRTFKNRALAVTQKIDLLDFARVLLMLNKKRGYKSSRKAKNEDEGQLIDGMSVAKKLYEENLTPGQFVNALIKENIKIIPDFYRSDLQIEFDKIWNFQKQYHADILTDEFLEQIKSKGKAETAKIFLGKYKIFTAENKGQDKKVIAYKWRTEALSNELTAEQLAYVLADIRGNIKNSSGYLGAISDRSKELYFNAQTVGQYLYKRLDENPNTSLKNQTFYRQDYMDEFEKIWETQAKYHALLNNEIKAEIRDVIIFYQRKLKSQKGLISFCEFENEKIEVVVDGKKKIKTRGSKVCPKSSPLFQEFKIWQILNNLEVTDKKTGEKYSLNLEEKELLYKNLNLKDKLSKTEVLKLVFDKPLNYDLNYKDVEGNKTNSELHKAYYKIISFSGHDDIEFDKLNLEDLNNTISNVLETLGIKKEILIFDSSLEKKEFEKQLQYQLWHVLYSFESDNSKEGNQKLLEILISKFGFAKEYAHIIANVNFQDDYSGLSTKAIRNILPYLKEGNKFDVACVYAGYNHSKSETKEEKANKILKAKLDILPKNTLRNPVVEKILNQMINVINTVNVEYGKPDEIRIELARELKKSAKEREEMTKNITSATTEHERYKDILQKEFGLAHISRNDLIRYKLYEELKDNGYKTLYTNTYIPAEKLFSKEFDIEHIIPQSRLFDDSFSNKTLELRSANIEKKDRTAYDYVKETFNENEFNQYISRIEQLSKSLKFSKAKYKKLLMKGSEIPEGFIDRDLRDTQYIAKKAKSMLEEVFREVNTTTGSITDRLREDWQLIDIMKELNWDKYDALGLTTEFKNRDGQTIKIIKDWTKRNDQRHHAVDALTVAFTKRSHVQYLNNLNARSDKSSSIYGIEQKELYRNDKNKLLFKPPFALNEFRAEAKKQLENTIVSFKAKNKVVTTNKNKYKTESGIKTKTELTPRGQLHLDTIYGKSCKYETKLEKVGASFTTDVINNVAQKKHKDALLKRLAAFDNDPKKAFTGKNALDKTPIYIDDLKTQKVPEKVKLVWMEPVYTKRKEITHELKIEKVVDSKIKIILENRLKEYGNDPKAAFSNLSENPIWLNKDKGICIKRVAITGISNAIALHDKKDKDGKFVLDENGNKIAVNFVNTGNNHHVTIYRDEKGNLQEKVVTFFEAVERVNQGLPVIDKSYKQNEGWQFIFTMKQNEIFVFPNDKTGFDPNNIDLTNPENYYIVSPNLFRVQKFGSLLSGFWFRSHLETKIDSQKELKSITYKVIQSTKNLERIIKVRIDHLGKIVSIGEY

SEQ ID NO: 23860 - protein, 1270 aa, unidentified
  REGION 1..1270: note = Cas Enzyme sequence
MKTILGLDLGVTSIGWAYINLADNNDTQPSEIIHLGARVIPLSSDENDEFTRGNAQTHNAERRDKRSARRNLQRYGLRKTLLTEQLKKVSMFPSEELFKLNSLELYGLRSRAISEQISLQELGRLLYLFNQKRGYKSNRKANNEEEQEKPTEQANEHDADQSNSKTGKPKVKGYLDLIADREQILQLEKITIGQFFFRQIQAKPHFRIKENIFTRASYIAEFDKIWETQQVFYPQVLTPSLCQTIRDRIIYYQRPLKSQKGLVSECRFEKHHKVAPKSSPLFQVFKVWQELNNIEIISYKGIKGKETDPRFNQYGRRELDFKEKQNLFSELSFKDKLTKRDLLKILGYKAGFNEYGLNIEKDIEGNRTAASFVKVFTKLNIDRKDLLAFELTSENIGQELVDSSTGEIIPVQRIKCDFEGQDFFTLWHAIYSIEESQVLIKLLVDKYAFTPDQATAISNLDFHKQGYGSLSTRAIRKVLPFLLKGMKYHEACLNAGYRHSDYKTTEENLARQLEDRLEILKKGSLRNPAVEKILNQTINLVNDVIEQYGRPDEIRVELARELKQNAEERKNAYKRITALDKRHKEIDERLRKELGFIRVSRKDIERYKLWEEFGGISPYDPSKAIALSDLFGGGYDVEHVLPKSRIFDDSFGNKTICPRTLNSGLHAKNQMTAFDFMKFRGEQAFNDFVEFVTMAYKNGKISRSKFERLMMPEEKIPDDFIERQLVETRYISKEVVKILTTVCRDVKSTTGSITDYQRHLWGYDLITQRLNWDKYDKAGKTTIEKDKNGNARYLIQNWNKRDDHRHHAVDALVIASTRQSTIQRLNNLNQIVKTKNGQSPQDALKASDLMGVEDYVKKVCPFPEQQVLDAVGKVLISLKAGKRVAIQNRNPYKYKKGDKPQQTSLTPRGYLHKEFTYGKINIYEKVKLSTFFNRLPDIAFEGVKEVLVNHLSANSNNPKIAFSAKGLKILLNTVENKPLHGLAIKEDIITVICFRPEYVRRYPLSSGFKSKDVEFIVDERIKAIVRQRIEEFGEKDAFKNLDTLPVWLNQVKGICIRNVRMFTGLDGLIPLHKSKDGKTFASKDDPSGHDVDFVSTRNNHHIAIYRDPEGKVCDNAVTFWDALKRKGMGLPIIIKNPKSVWDYILSKDIVENDLIEGLPKDNWEFITSVQQNEMFVFGIDLPTLTQAVSQGNLALISQHLFRVQKMSKQSTGSVDIVFRHHLETSVDDKKDGGELISRDLGKSIRIKSLGKLTGIKVKIDRLGRVVKIGE

SEQ ID NO: 23861 - protein, 1102 aa, unidentified
  REGION 1..1102: note = Cas Enzyme sequence
MNKTILGLDLGTNSIGWALINQSFDDAIGQPSNLWKGEIIDIGSRIIPMSQDIMGEFDKGNSVSQTAERTRFRSTRRLRERFLLRRERLHRVLNILGCLPKHYAASIDFNNRLGQFLPETEPKLAYSKGIEGKYEFIFMDAFNAMANEFKTANPNLFNSKKDGSNTKIPLDWTIYYLRKKALKEKIEKQELAWLLLHFNQKRGYYQLRGEDEDETPNKLIEFHTLQVANVTADEKQKGKDTIWYNIILENGWIYRRESKVPLFDWKDKSRDFIVSTDLNEDGSIKVDKDGKEKRSFRSPKEDDWTLLKKKTEQDIEKSRKSVGTYIYETLLKNPSQKVKGKLVRTIERKFYKEELFQILQTQKIFHPELQDNNLFSACLTELYGKNDAHRNSIGNKDFTYLFLNDIIFYQRPLKSKKSLISNCRYEARTYIDKGEMKTEPIKCIAASHPLFQEIRLLQWMKNLKIFEKETDLEVTSMLLPTEQNWTNLFKWLNNKKEVDHKALLKYLLSPLGLKPKQLDTEVARYRWNYVYDGSKDESKQYPCNETKTQILTGLTKVENVPVDFLTKEREEALWHILYSVTDKIQIEAALKTYARKNGLGPDFAEVFKKLKPYESDFGSYSAKAIKKLLPLMRVGEDWQTEENQKAIADNMPAYRKNIEAVISKIKTREEKAANPKLLAELAKLDDVITSYQGLPIHIACYAAYGRHSEEGEITKWKTVGELEAFLKNFRQHSLRNPIVEQVITETLRVVKDIWVKNGQSKENFFDEIHIELGREMKNPADKRKQMSEQISKNENTNLRIKALLAELNHDSSIQNVIPYSPYQQEILKIYEEGLLSADEDIPEDILKISQLPQPSQSELQKYKLWLNQGYASPYTGATIPLSQLFTPAYEIEHIIPQSRFYDDSFSNKVICEAAVNKTKDNQTGMEFILSNYGTKIEGISRPIFTKEEYETHVKRYFAKSPGKMKKLLMEDIPEKMIERQMNDTRYISKVVKNYLSNIVRKESGDDGTTSVNILSSNGAITSILKNDWGFNDIWNDLIADRFIRLNVLTQTKDFGDINPNTNKFLPTVPLGISKGFSKKRIDHRHHALDALVIACATRSHIN

SEQ ID NO: 23862 - protein, 1481 aa, unidentified
  REGION 1..1481: note = Cas Enzyme sequence
MKKGELPRLECFHNGIILIVICFRNKYKTNFRIPDTGNRKLKKNIIFIFKNDQKLMAMTKNILGLDLGTNSIGWALIKQDFENKQGEILGMGSRIIPMSQDILGDFGKGNSVSQTAERTKYRSVRRLRERFLLRRERLHRVLHILNFLPEHYASQIDFEKKFGKFKVETEPKLAWKNIAGQFSFLFQTSFNEMLEDFKVYDQDLKTPYDWTIYYLRKKALSQKIEREELAWILLNFNQKRGYYQLRGEDFEEEKDKIFVRLKVERILDSGETIKGKILYDVYFENGWKYDKQVVKTEDWVDRTKEFIVTESILKSGEVKRTFKAVDSEKDWIAIKTKTEQEIYNSRKTVGTYIYETLLQNPKQKIKGKLVRTIERKFYKEELRQILEKQKEFHKELQSDDLYNDCVRELYRNNETHQLTLSKKDFVHLLMEDLIFYQRPLRSQKSSVSNCTLEFRKYKNENGLERTQYLKAIPKSNPYYQEFRLWQWMYNLNIYRRNDDYNVTKEFLNSTEDFENLFEFLNNRKEVEQKTLIKFLLEQKDCNKKLINAEAEKYRWNFVEDKKYPCNETKTMIASSLAKVENISKDFLTREIEQKFWHIIYSVNDKIEYEKALKSFARKHHLDESSFFEAFRKFPPFKSEYGSFSEKAVKKLLPLMRLGKYWNYAVIDKNSKDRIQKIINGEFDENIKDKVREKAVHLTSENDFKGLQLWLAQYIVYGRHSEALMIGKWNSVDDLEMFLKDFKQHSLRNPIVEQVIMETLRVVKDIWLKYGSGAKDFFNEIHVELGREMKLPADDRKKLTNQIIENENTNLRIKALLAEMMNDHSVENVRPFSPMQQEILKIYEDGVLNSGIEIEDEYLKISKTAQPSSADLKRYKLWLEQKYKSPYTGQIIPLNKLFTPEYEIEHIIPQSRYFDDSFSNKVICESAVNKLKDNYIGLEFIKKLGGTVVECGNGKSVTVLKEDQYEDFVKKHYANNRGKRNKLLMEDIPEKMIERQMNDTRYISKYISGVLSNIVRVEDGSDEGINSKNIVPGNGKITNQLKQDWGLNDVWNDLILPRFERMNQLTNSKDFTAWNENHQKYLPTVPIKESKGFSKKRIDHRHHALDALVIACATKDHVNLLNNQSAKSDTRRYDLKKKLMKFEKVVYHHTQTGEKIEREVPKQFLKPWENFTVDAMHNLESIIVSFKQNLRVINKATNYYEKYVEKDGTKNKGRVEQTGINWAIRKPMHKDTVSGNVDLPWVKVPKGKILTATRKSLDTSFDLKSIGSITDTGIQKILRNYLEFKSSPELAFSPEGIEDMNKNIEKYNDGKPHQPINKVRVFELGSKFQVGQTGNKKDKYVEAAKGTNLFFAVYEDKNGKRSYETIPLNEVIERQKQGLSVVDLKATNDFYLCPNDLVYIPSDDELENINNIDFKNIAKEKNERIYKVVSFTGNRLSCVPYMAATTIVNKLEFTQLNKIEFTKEKEICVKLNVDRLGNISKA

SEQ ID NO: 23863 - protein, 1222 aa, unidentified
  REGION 1..1222: note = Cas Enzyme sequence
QFEKGQSITKNQDRTKSRTQRKGYDRKQLKKSDDFKYSLKKELEKFNIYPDEFLMNLPMLDLWKLRSDATSEPIDAKQLGRILYMLNQKRGYKSARSEANADKKDTDYVAEVKGRYAQLKDANQTIGQHFYKELSTAFSNNSYYRVKEQVYPREAYIEEFETIINTQKEHHSFLTDEVIDRLKNEIIYYQRKLKSQKGLVSVCEFEGFDRVTKNKTTNKEKTVFVGPKVAPKTSPIFQLCKIWETVNNISLKVKNPEGSKYKWGDRFPTIEEKKQIVEYLSVNAQLSFNELIKILNLKKDDVYANKQILKGIQGNITYQEINKILGESELLRFNTSVIESKKQALLVDKKTGEILEERNRLVIASSFEREPLYQLWHTIYSIKDLDECKNALMKRFSFNEVIADKLSRIDFNKQAFGNKSTKAIRKILPYLIEGFDYSQACSLAGYNHSNSLTKQENLEREVKPKLELLPKNSLRQPVVEKIINQMINVVNAIIDAHGKPYEIRLELARELKQSKDERDAADKSNINNKKQNDLIAVRLEAMGLPATKKYIQKYKFIFPTKDKKWKEADVVNQCIYCGETFNLTEALKGDNFDIDHIVPKALLFDDSQTNKVLVHRHCNSNKLDKTAYDYIAQKGNVKLNEYLQRVDDWFARGVLSYGKMQRLKVSFIEYQERKRLKKETEADKKLWESFIDRQLRESQYIARKSKQILEGICHNVTVTEGTVTARLRKVWGWDDVLMNLQMLKYRELGQTKMKEWTSEHGKRKHKKEEITNWTKRDDHRHHAVDALVIACTQQGYIQRINTLNASDVRNEMLKEVEDAKTQYSEKLTLLDKYLITQKPFTTFEVEKEADKILISFKAGKKVATTSKFKARGINKDKGVIVPRGALHEDSVYGKIKVEDLNKPIKYLFENPEKIVHQKIKKLIKERLIQNDNDVKKALSTIKKDPIFLDESKEVVLEKASCYKDVTVKKYDLLSLSSKQVEDIVDEKVKELVKERLKQFGNKEKEAFKDVLWFNEKKQIPIKTVRLFARPDANSLQPIKKDENGKDIGFVVQGNNHHIAIYRNKEGKQIQHSCTFWNAVERKKNKFPVIIKDTTHLWNNISEQKLPQSFLSLLPEDGLTLEFSMQQNEMFILGLTNDEFNDAIRNNDKSTLSKHLYLVWSISNNDYWFRHHLETKNTELKGIPTAKDSKRYFRFKSVGAIIGMNPIKVRLNHLGEIIKLGEF

SEQ ID NO: 23864 - protein, 1439 aa, unidentified
  REGION 1..1439: note = Cas Enzyme sequence
MKTILGLDLGTTSIGFAHVIEAEIPEKSIIHKIGVRVNPLTTDEQTNFEKGKPVSVNADRTLKRGARRTLNRYQDRRKNLIEILKHSQIITDETTLAEDGKYTTHQTWAFRSKAVTDRVEKEELARVFLAINKKRGYKSSRKAKNEEEGQAIDGMAVAKKLYDENLTPGQLSYQFLKEGKKTIPDFYRSDLNIEFDKVWSEQQKHHPEIFTSEFKKEVEGKGQRATSASFWNKYKFNTAENKGSRDEKKLQAYKWRSKAISEKLGKDEAAYVITEINNDLNKSSGYLGAISDRSKELYFNKQTVGQYLYSQLKTNPQTPLKNQVFYRQDYMDEFEAIWTEQIKHHKELTDALKTEIRDIIIFYQRKLKSQKGLVSFCEFESKEIEVEKNGNKIKKTIGLKVAPKSSPLFQEFKIWQVLNNLLVRKKGSRKRVAKKNIFTDEEPEIFTLDIEEKQSLFDDLNLKGNLSATKALSLLGYKPTEYELNYNIIEGNRTNKILYDAYLKIIEFEGYDIKDLLKVKSNKDDVELDDIDIPSIEIKKMVADIFNSLDIDTQILNFNAELDGTAYEQQKAYQLWHLLYATEDDSKKYSDEDKLVYGNENIGLKKNLCSKFGFKPDHTKILVNIAFTDDYGNLSSKAIRKIYPYIKEQNYADACIQAGYRHSKSSLTKEEIENRPLKGRLELLKKNSLRNPVVEKILNQMVNVVNTLIDTENTKLKAEGLPQDFKFDEIRIELARELKKNAKERAEMTANINSAKTQHEKIIKLLQTEFGVKNPSRNDIIRYKLYEELKNSGYKDLYTNEYIPREILFSKQIDIDHIIPQAKQFDDSFSNKTIIYRKDNLDKGNKTAIDYIESKYGSEAVETYVSRVKNLFELGQRTKEEGISKAKFQKLQKRESEIGDGFIERDLRDSQYIAKKAKNLLYDITRSVVSTSGSITDRLREDWDLVNIMQELNFDKFKKMGLTEMVEKKDGTFKERIVDWSKRNDHRHHAMDALTVAFTKHNHIQYLNYLNARKDKKHKLHYNIIGIEEKETELAIDKDGSKKRVFKLPIPNFRQVAKNHLESVLVSHKAKNKVVTKNKNIIKTQNDTKTKIELTPRGQLHKETVYGRYQYYVNKEEKIGTKFDTETIAKVSNPLYRNLLLQRLQENDSDSKKAFGGKNVLSKNPIYLDETKTKTLPETVNLMWLEEDYSIRKDVTPENFKDEKTIEKVLDGKIKQILLDRLKQYGDPKKAFSDLDKNPIWLNSAKGIAIKRVTISGVKNTEFLHYKKDHKGIYILDKNGKKIPADFVSTGNNHHVAIYRDENGSLQERVVSLYDAVQLVNAGEPVIDKVYNQGLGWQFLFTMKQNEYFVFPNDKTGFSPKEIDLLDPLNKKQISPNLFRVQKIASKNYFFRHHLETTVEEKKDLKDIAYKPQLGLNAINDIIKVRLNHLGDIVKVGEY

SEQ ID NO: 23865 - protein, 1380 aa, unidentified
  REGION 1..1380: note = Cas Enzyme sequence
MEKVLGIDLGTNSIGWAIREVNTGLDNQIIHKGVMTFDKGVAEDKSGEHPMVQKRTESRGKRRNYQAEKYRKWNLLECLINNNMCPLTIDELNEWRHYKKGTGRKYPQSQKFIEWLRYDFDGDGKPDFERLGYSKHESYYLFRALIVDESKTKIFRTERNIIGRVMYQLVQRRGYNDGQNIDEADFEELSKTIMKGGGDAGAIGVDKIIPFIEKHKTLGAALYFLQKENNGIRIRKRYNLRSHYENEIREICRIQGIDHLFHFFWGAIIWQRPLRGQKGLVGICTFEKNKRRCPISHPLYEEYRTWVFINNLNIRPIEDDETKSEKQKQQELRDVLHGIVYPQFFKVATEFKLSSIAKVLNKAGYEIGARFSEDTKVVSFSFIQRIKEIFGDDWPEVTGWQELLNKKSKATKYNIEDLWHLHFTKSDNKKTNETAYDFLANFAANTLHLDPPKAESFAKLRLQQGYATLSLSAIKKILPYLREGFIYSEAVYLANLHKVLGVGELSEDIISHFSEEVKRLIGQTRVQRKLVQSLNELISDHLNAETRFGMEASYQLDDDDRKDIVRKLEEVFGKRSWENLTESEHEDAKNFVGEKYLAFLRKRIHEKGAFEKLERIHDKIFNWLKLTYDVSDERIKYLWHPSEQESYPPAIEKDGNLYLGSPEPISKGFKNPMALKTLHKLKHLINYLTKTGKIDADTRVVVEIARELNDSNKRKAIERWQRDREKKNESYKKRIDEINEETNSNFNREDKNLIDKLRLWEEQSERCLYTGKTINCKEILDGGKYDIEHTIPASMSFDNELKNLTVADKKYNQQVKGKRLPAECPNYESDYFLDGVTYPSILATLQSVFGKITVSQKRLNGRTVVKRNFEKVEQLEKLYEEWKSKTSEDKETKDNIIVRQHLIKMDLDYWRYKLNTFLISEYKTGWRNSQLRDTQTITKYALPYLKTVFNKVEVQKGNITSDFRKIFKIQHRLEKKERTKHSHHAIDAAVLTLIPTAAVRDKILLRYNEAQETDRGYHESPRNWPSFRTQQILGIEDDILINYQAQHRTLTPTYKIVRKRGRVQYVKEKLFNGKWQFKLNKDGHKIPLIAKGDSIRGQLHKESFFGAIKIKGELSLVERYSITSFTSIADCKNIVDLAVRALVESTLQVRMQQGLSFDQAKTEPIPFDSGKTVIKKVRCKVAAGRGYLTPEKALEIRQHTYPSKHEYKNSVYAQNDQNTFCLYYELEENGKVHRAFRILGLFELAKLGLSKESDLYLDNYYNKFETGKGEKIRQLPLTYIIKNGLRVIFYKEHIEELKDLNRLELLKRIYRVYKFNSAPSDYVYCQNHLEARNNDALGKGDNELNFEKYQSRVFLTASKLTAAFEGKDFEILPDGDLRWL

SEQ ID NO: 23866 - protein, 1224 aa, unidentified
  REGION 1..1224: note = Cas Enzyme sequence
MKKILGLDLGVASIGWAFIHENDEKTALNEIIATGVRIIPLDTKTEKDEFAKGGNVGTNVARRKFRGARRNQQRYRLRRGDLLNALKLSGLLPEKKTYLLSPADLFSLRAKALTEKLSPGEIGRVLLHLNNRRGFKSNRKSEEKEESNYKEAIKARELKLTTASETIGQYFAENLSAHPDFRVKQEIFNRSTYQEEFDLIWASQARFYPAVLNETTRKKIRDKIIYYQRPLRSQKGLVGECALEWNYAIDKQTKDFVLLANGQRKVVRPKCAPKSSPLAQECKVWESIHNIRITDETGVYYEMSNAEKKLIFNTLQDKKELTATALLKLLNLTPSKYTPDALIREKKLQGNHTRVKLLETFQKFAIQRRDILVFQPVIEEAEAVNFEHGNKFSRLQLRADFDKEPLYQLWHLIYATEDENDLIRLLQERYQFTSEQAAGVAAIDFSAAGFTNKSSRAMRRLLPHLQTGKDYTNACVQSGYNHSNSITSAENDARQLLEKLEILPKNSLRNPVVEKVLNQMIHLVNAILQDTTMGKPDEIRVELARELKQSAKERKGIFNKQNQRERDRKDIRKRVSEMLKIQPESVTKVQIEKWQLWHEVNGISLYSGKKTELSSFLRGEGVDIEHIIPKSRCFDDSFENKTICETRFNQDKDKQTARDFMESQPVEGLQNIDAYLRRVNDLERMGKSGGKEGEGISRSKYNRLMMEAKGIPDDFISRQLRETQYIAKKAKQILVDICFNVYASSGSVTDFLRHQWGWDEAIEQTRLPQFRDAGKTDIILIKRGQQQKETIPGWTKRLDHRHHALDALTVACTKQAFIQRLNHLNQTYDQLKGANRRDALRSHGQKTIANHENAPFSTTTVINAMDQILISFRQGSNVASPSRNKVAGQKTLTPRGPLHEETIYGRTRFYKTVDLNGRFDAKWLNEMVHPHQKELVQTRLDLFGNDPKRAFKDLDKKPISYGNKQEKSLKKVTIWNYTYVSRKSVDVTLTEKQVEKIADPAVKAALQKRLADGGGNPKESFKNIGIDPVFAGGPFPVKRVRVKNPAEKMIALPRGYAEPGSNHHIAIYKDGNGKKQEHVVTFWDAFQRMRLGIPAIIKDTKAAYGLIENAEDGKFPDDFYLPGYDWEFITSLQSNDMFVFGLDPKEVDFRAAKNQKMVSKALFRVRKLSSGNYWFMHHLETEILEDTESKALGRCKQCSPSSLEGERGIKVKLNRLGKVTQTGE

SEQ ID NO: 23867 - protein, 1378 aa, unidentified
  REGION 1..1378: note = Cas Enzyme sequence
MKTILGLDLGTTSIGWAFVKEGDNQNSTIEKIGVRVNPLTTDEQTDFEKGKSISSNADRTLKRGARRNLDRYKQRRNNLVSVLKEHNIISDKSHLAEATKESTHSTYLIRSKAASEKIEKEDFARVLLMINKKRGYKSSRKAKNEDEGLVIDGMAIAKTLYEQNLTPGEYSLQILKSGKKYIPDYYRSDLKAEFEKVWESQKRFYPEILTDEFKNELNEKGQKATVAIFIARHKIYTAENRTGTRDEKKLKLYQWRSNALKEKLKIEEVASVISEINNNIHSSSGYLGSISDRSKELYFKKETIGQYLYHQLKNNLHFRTKGQVFYRQDYLDEFETIWETQAKFHTELTPELKIEIRDIIIFYQRRLKSQKGLISICEFESKQVQVTNDGKMKTKTIGYRVIPKSSPLFQEFKIWQNLNSLEAQNKKTNQIVEFSHEQELKEKLFEELNIKGNLSKEQILTTIGFKPSEWELNYSVVEGNRTNHAFYEIFEKIFLFEGNEEIDFADMPAIEIRSIVADLFNALNIDTKILQFDAELEGKSFEKQSSYQLWHLLYAYEGDNSNTGNDKLIEQLQKKFGFKKEHAQLLSNVAVSEDYGSLSAKAIRKIFPYIKENKYNTACALAGYNHSSSKTKEENDTRLLKEKLEILPKNSLRNPIVEKILNQMINVVNAIIADPAFGKPDEIRIELARELKKNAKERAEMTKNINGAKLLHENIIKLLQNEFGIKNPSRNDIIRYKLYDELKGNGYKSLYSDTYIPREKLFSKEFDIEHIIPQSRLFDDSFSNKTIAPRQENINKKDETAYDFVTNSLGKEALDNYVARVEMMFKLKEGNISKAKFKKLMMKGTEIGKGFIERDLRDSQYIAKKAKELLEEVCRYVTTTTGSITDRLRNDWDLINVMQELNFDKYKKTGLTEIIEKKDGNTKERIIDWTKRNDHRHHAMDALTVAFTKRSHIQYLNNLNARSDKASSIYGIEQKETFIQVDDTGNKKRKFKPPLKNFREEAKAHLENVLVSYKAKNKVVTKNKNKIKVKGGEKVKIELTPRGQLHKETVYGKLKLYSSKEEKISVKFDEATILKVAKYREREALLQRLREYGNDPKLAFTGKNSPAKNPIYLDPQKTMQLPDKVKLVELEDDYTIRKEIDPDLKIDKVIDIGIKRILQKRLEEYKGDRKEAFSNLEKNPIWLNKEKGIAIKRVKISGVKNAEALHYKKDHIGNVILDPKGNNVPSSFVSTGNNHHVAIYQDENGDFQEKVVSMYEAVERVNQQLPAIDKTFNQYLGWKFLFTMKQNEYFVFPTQGFDPKEIDLLNPENNKNISKNLFRVQKIATKNYMFRHHLETNVEDKKELKNITFIHIQSCSLLKNILKVRINHIGQIVKVGEY

SEQ ID NO: 23868 - protein, 1492 aa, unidentified
  REGION 1..1492: note = Cas Enzyme sequence
MSSKKILGLDLGTNSIGWALVDMDFENKTGRIEGLGSRIIPMGQDVLNKFGDGTSVSQTAERTWYRSVRRLRERYLLRRARLHRVLNILGFLPEHFAAAIDFENRLGQFINDSEPKLVYDNGKFIFHASFNEMLEEFRIHQPELLNRKNLNGQDAKIPYDWTLYYLRKKALTDRIEKQELAWLILNFNQKRGYYQARGEEDEKSDVREFVELLKVVAIERGEVDKKNNRRMWYTIGLSNGWSYSNTFTAEPKWLNQEKEFLITEELDQDGNVRIVKDKKSDTSGKEKRRIVPLPSSEEIEVMSKTEQDKIYKKIKVKTELSISTSGKTVGSYIYDTLLRKPNQKIRGKLVRTIERKFYREELTLILKKQQEFHPELRDEDVYASAVRELYRNNEGHQMMLEKRDLVYLLLDDIIFYQRPLRSQKSSIANCSFEFRRYREKDGSIRKEYLKAVHKSNPYYQEFRVWQWLKNLRIYEKLGDIDVTSNFISTQDDWVRFFDFLMTQNEVDHKDVMKYLLSEKGLKGNALKAEMGRYRWNYVYNSESDESKSYPCNKTGYEFRKRIEKAKAGHILSKEREYQLWHIVYSVTDKAEYEKALRSFARSNNIEPDSFYESFRNLTFENEYGSFSEKAIRKMLTLMRMGKYWEWESIDEATRSRIDKIRSGEYDEHIRNRVREKAFLLNDDSDFQGLPLWLASYIIYDRHAESGSATKWNTPDDLDAFLRGFKQHSLRNPIVEQVVTETLRVVRDIWNKFGNGEAGYFDKIHVELGREMKNTAEERKQLTSKISENENANIRIKHMLMELLNHPDVENVRPHSPGQQQILRIYEEGVLNSGVEIPDFVSETLKKFRESDEKKRPTSSEITRYKLWLEQKYRSPYTGQAIPLSKLFTPAYEIEHIIPQSRYFDDSMSNKVICEAAVNKLKDNLIGLEFIKKHQGEKVDVGFGKTVEVFSEKEYIDFIQQHYARNRSKLNKLLLEEIPQKMIERQMNDTRYISKFISELLSNIVREDKDDDGVNSKNLLPGNGRITSELKHDWGLNEVWNSLILPRFERMNALTKTTDFTARNAEGHLIPVVPFELSKGFQKKRIDHRHHAMDALVIACATHDHVNLLNNQSARSETTRYDLQHKLRNTEKWTDKNGKERLKFTEFKKPWSTFHTDAADALGKVVVSFKQNLRVINKATNHYMKWGERDGRRKKVAVEQKGVNWAIRKPMHKETVSGKVELGRFKLPKGQIFTATRKALDSSFDLKAIESITDTGIQKILSNYLKQDKFKIIRAGGDVYYDPTLAFSPEGIDEMNKNIHLYNDGKPHQPIMKVRVFEKGSKFPVGQRGNKKTKYVEAAKGTNLFFAIYIDDSGKRSYDTIPLNEVIERQKQGLSPVPERNQKGHKLLFHLSPNDLVYVPFKDELESGVSVDFKILATFQSQRIYKMVSSTGSECHFVRADIASLIKTYDSKSKNGELGSLNKLETTIDIESTRIKEKCIKLVVDRLGNCSKV

SEQ ID NO: 23869 - protein, 1532 aa, unidentified
  REGION 1..1532: note = Cas Enzyme sequence
MKNILGLDLGTNSIGWALTELDFAKKEGKINALGSRIIPMSQDILGKFDSGVTISQTAERTGYRSVRRLLQRNLLRRERLHRVLNIMDFLPEHYAKEIDFKKHLGQFKNEVEVKLNYRENEQGKHKFIFMNSFDEMAKEFETNGLSTKIPLDWTLYYLRKKALSQKINKEELAWIILNFNQKRGYYQLRGEEEEIRDKNEEFYTLSVANVKETDDKKKDGSIWYNVILENGWIYKRSSKIPLFDWLGKTKEFIVTTTLEKDGTEKKDKDGEVKRSFRAVDSEKDWIAIKKKTEQDIANSKKTVGQYIYETLLQNPTQKIRGKLVKTIERKFYKEELIAILIEQKKHHPELGDKLLYETCVEELYPRNEAHQKNIFKNDFTYLLVEDVIFYQRPLKSKKSTISNCPYESRSFTKEGKKVVQPIKCISRSNPIFQEFRLWQFIKNLKIHQRGITVNNIPEIDYPVTEQFLKTQTEIIELYDFLNDKREIDQKQLLKHFNLSEKTHRWNYVEDKKYPCNDTRVSFSSRLCKVTNLNPETFLTKETEHELWHIVYSVKDKKEFEIALKTFAVKKNIDESSFVENFRKFPPFKNEYGAYSEKAIKKLLALMRLGKYWNEESIEGITKNRIQSIIERLGTIDFDKEKIDGITDDDIPKQVLKSFIGNRENPFSGLNTYQACYAVYNRHSEVSEITKWKTPNDIAKYLEEFKQHSLRNPIVEQVVTETLRVVKDIWELYGEGREDFFNEIHIELGREMKNPAEKRKQLTQRNSENENTNQRIKALLQELKNDINVKSEVKPYSPSQQEILKIYEEGVFQNSPEEYKFIKLEEVEKIRSNNSPSRSEISKYKLWLEQGYISPYTGKPIPLSKLFTTEYQIEHIIPLSRYFDNSLNNKIICESEINELKDNKTAFVFITEEKGRIVALTENKTAKLFTIEEYENHCNNYFKKNRSKLKNLLSEDIPEGFINRQLNDSRYISKLIKGLLSNLVREEDEEEATSKHIVPVTGAITSQLKNDWGLNDKWNEIVAPRFMRLNELTNSRDFGYWDKTINAFRSQVPDEIARGFSKKRIDHRHHALDALVIACTTKDHISYISSLNTQRKNYGLIDKLRVRKEIQIKNKKTGETIIKKVASDYHKPWPNFTINAKEALEQTLISFKQKTRVITKANNKTWQWVHKNGILKKELVAQTKGDNRAIRKPLHKETVYGKVIIKREKGMVSIAKALENWEMIVDSTVKEIVKEKVKFYKTDMKLLKKYFKDTPITIEGKKIDKIMVFEKVDATASRVALTEKLTRKQLESITDSGIQMILENHIKNYIDAKGKEHFELAFNPDGIEELNKNIVSLNNGKFHHPIYKVRLYEVGNKFPVGYTGNKKDKYVETAKGTNLFFAIYQDVESKKRSYETIPLNVVIERKKQGLNVAPERNENNNILLFTLSPNDMVYMPNEEEQEQHDLLNIKKLNKDQVERIYKIVSSTGNRLHSIPNNISKPIFNKIEFSILNKLEFDLQGKSIKENCWKLKVDRLGNIKRVINSLNAQSNVVV

SEQ ID NO: 23870 - protein, 1382 aa, unidentified
  REGION 1..1382: note = Cas Enzyme sequence
MSKILGIDLGTNSIGMTLRNDDFFEWYGVYTFRKGVGDGKSGEFSLAAERTQNRSSRRLYNSRRYRKWETLKVLIENGFCPLSIENLNKWKNYKKGTGRIFPVDNIAFNAWIKLDFDTDGKPNYSSPYQLRRELISQKLDLNKNADKLKIGRALYHIAQRRGFKSSRKVGANDKTAVYKGSKETGTVGRNSYEELIIENGSLGAAFAFLEDEGIRVRNRYTLRSDYLNEVNKILDFQDVKDAFKENIIKAIFYQRPLRSQKGLVGKCTMEPNKPRCPISHPHFEAYRAWSFINNIKYRTDQTEAFQPLPLSLRKEIIYEKLLIKANKTSFDIIRKFIVKGERKHWELNYSERMDKMTVSTCPVSAHLKAAFGDDWENVIIETEKIKKDKKGENHKISYNIEDVWHIAFSFEDEEYYEEFLVKQLRLNEDQIYQLKKLWNALPTGYANLSLKAINNILPFLEEGIIYSESVFLAKIPEIIGKQLFDDHREGILEALHLEIKNNRHQKTVINIANALIADYKVLDGENKFAYKDVSYKLDETDKKEVLKACIKHFGKNKWDKKREEEQDNIVEQVQDKYQDFFSASKRDYFKQPKLIEQIQNFLIEEFNVSEEAVEKLYHPSMIDIYPSSEDQQFLKSPKTRAFKNPMAYKTLHKLRHVINHLLEKGLIDNDTRVVVEVARNLNNKNKRAAIEDYQRTRERENFEFGIAITELIKDPEFKGSANPDNKNDRDKFRLWAEQIEDKEEVIKNILATKEEIRKYRLWKEQKCVCFYTGKIIKLTDLFNNNVVDFEHTIPRSKSFDNSLANLTVCYADYNRNIKKNKIPTELSNYKEFSNGYSAIEPQLKDWKNKIDSLYGQIQTQVKNSKYAVDKESKDIAIRRRHLLQIEYDYWKNKVDRFTRVDVPSGFRNSQLVDTQIISKYAYHYLKTVFNQVETIKGIITSEFRKIYEIQPRDESKDRTKHYHHAIDAAVLTLLPTSAKRKEILEKKYKYEETYHNNKYHEKPFDAFNYSMIKQIENEILINNMEDQDQTLTPAKKYVRKRGKIEYLRDDQGNNLKDEKGNRFPKVATGDSIRGQLHLDTFYGKIKIAAKDDNGSLLRNEDGSVQYLKDKKGNEVYKMVGRKSIDKVNFETDIIIDEHLANHLRKQIENGVNQNELKDFQGNIIRHLRCEVKSGRGVMNPENATIVKDQTYKSDKEYKNYYYADSGDNYMFGLYENENGRKIVSINTFDSTQLSFNQNDDTKKQIFKSQEPVLVGRGKSEKEAALIHVFLPGQKVLFFLNDKEELKELDKSDLSLRLYYIKKLADANAQRILFQHHLEARNDENLQKDFPRSEFGTKGKDGFSSFTENFIAPKLLLTPTKFNFVIENKDFDMQMDGTINWKF

SEQ ID NO: 23871 - protein, 946 aa, unidentified
  REGION 1..946: note = Cas Enzyme sequence
LWETINNITINNKRGEAFVISLEKKKELFNYLDTNKELTDKKLFEILGLGKNDGYYGNKQLSKGLQGNLTKTAIVKILKDQADLDKLIGFELSIESYEKVDVSSGEVVNRKRITAEVEKQPLYKLWHILYSIPEEKDIIKKLSHDFNLSEDVASQLAKLDFTKGGFSNKSAKAIRNILPHLQQGAKYSDAMTLAGYNHSDSITAKENLIRPLKDNLKLLPKNSLRQPVVEKILNQLINLVNAIIEQYGKPDEIRIELARELKQSLDERNNTFRNNTKRETENKAIAERLSKEYRVKANRRNIEKWRLYEQTDGNCLYCGNKIELSDFLNGDESDVEHIIPKAKIFDDSFQNKVISHRKCNKAKDNLTAYDYMLTQSTEQLNRFEEAVAQLFKDRKITKAKRDKLLMTEAKIPIDFIARQLRETQYIARKSREILQEVCRNVWATSGSVTEKLRKLWGWEEALMHLQLEKYKAAGKTEWVEFENNGQKHKKERIIGWTKRDDHRHHAIDALTIACTQQGFIQRINTLNSKHTRDEMLAEVKDQVYKEKLTLLEKSLLTKRPFDTAVIETHASQILISFKSGKKVATLGKRKVKKNGKSILKQEGIIIPRGALSEESVYGKIKRRKYQTVKLSSSFTDVDSIVNKTHKALIKQRLAESDNDPAKAFKALSKNPIWLDNSKTNALTAVEIMTFKDEYVIKYPIGTLTVKDLPSIVDNGVRKAIEKRLAEHNNNPKEAFKDLENKPVWFNEEKRIPIKTVRCYTGLDAVAPVNFNDAKKAIGFVKPGNNHHIAIYVNKEGKKVEHAVTFWDAVERKMNNLPVVIRNPKEVWDAVLSEKEKYTQDFLNKLPEDGWTYLTSMQQNEMFIFNLSNEALNEAVQTKDYKLLSENLFRVRKITEGAYWFNHHLETEPKESLDDKKAKRCVQASLSSMSGIKVKLNALGQIVRIGD

SEQ ID NO: 23872 - protein, 1384 aa, unidentified
  REGION 1..1384: note = Cas Enzyme sequence
PNLLLNDKKVPYDWTIYYLRKKALTAKIEKEELAWLLLHFNQKRGYYQLRGEEEEDTPNKLVEFHALKVVEVTADEQQKGKTDIWYNVILENGWIYRRSSKAPLFDWKGKIQEFIVTTELNDDKSIKLNKDGNEKRSFKAVDSELDWVAIKKSTEEKIDKSKKTVGCYIYETLLQNPNQKIIGKLVRTIERKFYKEELKQILEKQVLEHPELQNRKLYNACIEGLYENNTAHRENIKEKNFVHLFVNDILFYQRPLKSKKSLISDCPFEQRTYLKDGKKEIQSIKCISKSNPLFQEFRLWQFIQNLKIYQKEKTIDGKAYSDVNVTTEFLKSEDDYSNLFDWLNERKEIDQKAFLKYPAFNLKKNAENYRWNYVEDKSYPCNETHNAIVNRLSKVQKVPSDFLTRDKEQDLWHILYSVEDKIEIEQALKSFAIKNNLSEDFSEVFKKIKPFDKDYGAYSEKAIKKLLPLMRMGKYWSEEAIHPQTKNRIEKIINGEVDDKIKDRVRDKSIHLNTINDFKALPLWLTSYIVYDRHSEDSNAMQWKRPEDIENFLKEFKQHSLRNPIVEQVITETLRVVKDIWKTYGNGSANFFDEIHIELGREMKNPANIREDMTKKMSANENTNLRIKALLSEFLNDASYENIRPYSPSQQEILKIYEEGVLNSEVEINEDILKISKTAQPSTSELNKYKLWLEQKYRSPYTGEIIPLNKLFTSAYEIEHVIPQSRYFDDSLSNKVICEAEVNKDKDKSTAYEYIRDNHGKKIELSFGKVVTIFEEKEYEDFVKRNYAKNRSKLNKLMMEEIPESFIQRQLNDSRYISKVVKNLLSSIVREDYEQESTSKHIVSSNGNITNVLKQDWGLNDVWNDIVSPRFERLNELTKSTNFGEWTNKNGKRVFQTQVPLELQKGFNKKRIDHRHHALDALVIACASKNHINYLNNQYAKSDTNRYDLQKKLRRHEQVEITDKKTGEKKKINVAKEFFKPWDNFTIQAKDSLENTVISFKQNLRVINKTVNYYQKWVADGNGDLKKQTVKQEGNNWAIRKPMHKETVSGSVSLRKIKNGVSLLNAIDNYEMIVDKSLRKKIKQLIEEKNDKKKIQTFFKNIENKWNDKDVTKVDVYYFDNDNVATRSKLDESYTSKFISDSVTDTGIQKILLKHLEKYSETNGSKIIEHPELAFSPDGIDDLNKNIISLNNGKFHHSIQKVRTYEAKGNKFKVGHTGNKKDKYVEAAKGTNLFFAIYKDEKGKRNYETIPLNIVIENQKQGALQNIKPEFCSVPTKNEKGDSLLFHLSPNDLVYVPTNEEFENPNLVDLKKISKEQINRIYKTVSFTNTQAFFVKNEVANTIVNKVEYSALNKMERGINGEMIKDVCWKIKTDRLGNILNVLK

SEQ ID NO: 23873 - protein, 1383 aa, unidentified
  REGION 1..1383: note = Cas Enzyme sequence
MKRILGLDLGTTSIGWAFVNEAEDNNEQSSIIKTGVRVIPLSTDEHQDFKKGNSITINADRTLKRGARRNLQRYKQRRKAVLQILKEIKFLDHIKFLSEEGASTHSTYALRAKAPLQKIAKEDFAKVLLMINKKRGYKSSRKTNNQEEGQLIDGMVVAKELHNKNITPGQYSFKLLTDGKKQLPEYYRSDLQNEFDSIWNVQKEFYPEILTDKHKENLIRKNKSQTENYIKETLNIEKAENKGKNKKLEQYEWRNRGVLEKIEIRELAFVLIEINNQINQSSGYLGAISDRSKELFFNNFTVGQYQYNFLKENPQASIKNQVFYRQDYIDEFDAIWDEQSQHYPELTQEVKKRLRDITIFYQRKLKSQKGLISICELEGKEKEIRIDDIKKKKHIGPRVAPKSSPVFQQAKVWQNINAIKISKKGNSNEEYLIEEDTKKLLFYELNIVEYWSSSQLLKWIFQGSSENPKDWQVNFEKIEGNHTQASLYKIYQHIIDIEGYNAIDFQKTNALTLLENLQICFKEIGISTDILTLDMYSSGNEFSKQPAYELWHLLYSYEDDQSPTGIESLKETLQTNFGFKETHTKLLTSVIFKQDYGNLSVRALRKIYPFLENGHQYDQACSLAGYNHSHSLTAEENKNRPLSETLELLKKNALRNPVVEKILNQMINVVNTILQHPEMGRPDEIRVELARELKKTAAQRKDMTTAISKATRAHEAYREKIKEEFGLSYVSRKDLIKYKLYLELKSIGYKTLYSGTYIRPEELFTNKFDVEHIIPQSVLFDDSFSNKTLELRDVNLEKGNETAFDYCERKGWLTDFESRIQEVFSKKDITYGKRQKLLMTKTNIPDDFLNRDLGNSAYIAKKAIELLRQICRGVRPTSGNITSKLRSDWELINVLQELTWDKYSALGLTYYQKNKEGKELPRIKDWTKRDDHRHHAMDAITVAFTKPAYIQYLNNMNAKGEKDSSIYGIEQKYTYRNGEGGRKFKKPFENIREESKKHIETILISHKAKNKVVTLNKNKIKIKGKGNFISKIELTPRGQLHKETVYAKSNYYEVKDEKISNKFDIHKIQSITNPDYREALQNRLASFDNDPKKAFAGKNSLAKAPVYIHNATDKVPETVKTKTLRSQFTIRKNVTPDNFKNEKSINKVVDLKIRNILQNRLALSGGNAKEAFSNLEDNPIWFNKEKGIVIKSVKITGVSNAESLHYARDHKGRVLLDHDEKQIPVDYVSTGNNHHIAIFQNDIGDLDDEAVTFFEAVERKNQGLPIVNSHSQKGCPLLFTLKQNEMFVFPSEDFDPLQVDLLNPVNHKTISKHLYRVQKFSKVLYGNSSVRDYVFRHHLETELKDSKALKDITWKPIKSLGHLKGIVKVRLNHLGEIVQIGEY

SEQ ID NO: 23874 - protein, 1473 aa, unidentified
  REGION 1..1473: note = Cas Enzyme sequence
VICFKIVLQKYELFFSKQVISVEKYIFLEKMYFESNIMKKILGLDLGTNSIGWALIEADFESKQGKILGSSSRIIPMEQGMLASFSGGKPLKTQTADRTHYRVMRHLLERSKLRRERLHRVLNVLGFLPEHYSAEIDFEKHLGQFVSEKEPKLPWKKNENGTFEFLFKRSFLEMVEDFKINSQEVKIPYDWTIYYLRKKALSKKIEKEELAWILLNFNQKRGYYQLRGEEEDENPNKLVEYHSLQIVDVVADNPNARGDVWYNLQLENGWIYRRSSKTPLFDWKDKVRDFIVTTELNDDGTIKIDKEGYQKRSFRAPSEDDWTLIKKKTESDIERTQKTIGTYIYDTLVQNPTQKIRGKLVKTIERQFYKKELELILKKQIELQPELFTEDLFNDSIRELYRSNIAHQYVLSSKDFVFLFVNDILFYQRPLRSQKASIGNCSFEFRQYRDKDGNEIREYIKACPKSNPYYQEFRLWQWLYNLKIYTKDDDIDVTTEFITNNEDKVNLFDFLNARKFIEQKYLIEYLLKDKGYNKKDISKYRWNYVEDKKYLCNETRTLILNRLTKVINFNADFLTFEIEQKLWHIIYSVTDKNEYEKALKTFADRYALDVVSFVDSFKSFPPFKSEYGSFSEKAIKKLLPLMRLGKYWNLNYIDEKTKYRIDKIITGEYDETIKDIVRNKAINLTSEFDFQGLQLWLAQYIVYDRHSESDNLVRWNSVQDLEKYLQDFKQHSLRNPIVEQVVTETLRLVKDIWLKYGLGAADFFKEIHIELGREMKNTAEDRKKITNQITENENVNHRIKALLAELQNDASVENVRPYSPTQQEILKIYEDGILNSGIEIPEYIKKITATSQPSSSDLQRYRLWLEQKYRSPYTGQPIPLGKLFTSAYEIEHIIPQSRYFDDSFSNKVICEAAVNKLKDKLLGFEFIRSFHGQIVETGFGSTVKIFEESEYKDFIKLHYVNNYSKRAKLFLDEIPEKMIERQLNDTRYISKFVTQILSNIVRESTGDNGVNSKNVIPVNGKITSVLKKDWGLNDVWNDLILQRFKRMNQLTEVHAFTTWNEQYQKYLPTVPLEFSRGFQKKRIDHRHHAMDALVIACATRDHINLLNNKHARTNEERYDLQRKLRNFIVVSYTDSNNQIRTKNIPKEFKKPWSNFTVDAQDELAKIVVSFKQNLRVINKATNRYERIKGGKKIKDYQKGLNWAIRKPLHKEFVFGKVNLPWVKVPKGKINVAIRRNLDISFDYKKILTITDTGIQNILRKYLASKDSNSEVAFSPEGIEDMNKNIWQYNDGKMHKPILKVRTFEVGSRFQLGQTGNKKDKYVEAAKGTNLFFAIYIDEAGNRSYETVPLNIVIERLKQGLNAVPEINDKGKILLFYLSPNDLVYVPTVEEIENNRSINFVDLGKEQTSRIYKMVSSSGSQCFFLQQFVANTIVDKMEFSALSKMERSITGEMIKDICIKLNVDRLGSVTSLSL

SEQ ID NO: 23875 - protein, 912 aa, unidentified
  REGION 1..912: note = Cas Enzyme sequence
GHEIDIEKKSANEILKVVEEIFSALGFNTDILYFDSSKPLDKQPMYKLWHLLYSFEGDNSKTGNENLIDKITELYGFDKESAKILANVTFQDDYGSLSAKAIRKILPYLKAGNKYDVACQYAGYRHSASSLNREELNAKNYKDHLEILPKNSLRNPVVEKILNQMINVVNSIIDTYGKPDEIRIELARELKKNAKEREELSKSIAETTKLHEQYKAILSKPPFNLSYISHNDIVRYKLYEELKENGYKTLYSNTYISPANVFSGDFDIDHIIPQSRLFDDSFSNKTLELRSINIEKGNKTAYDFIKEKYGESGEENNLDNYLSRIEDLYKKGILSRAKYNKLKMQEKDIPEGFINRDLANSQYIAKYAKTMLGELVKFVVSTTGSITDRLREDWQLVDVMKELNWEKYYNLGLTEEFINEEGQRIRKIKDWTKRNDHRHHAMDALTVAFTKRQFIQYLNNLNARRLDESQGISNAEKEEQDNYAIGAEDVILSTRDVLGIEKKYLYRDNKNKLRFVPPIPLDEFRAEAKRQLENTLISIKAKNKVTTKNINITKKKGGVNKKEQLTPRGQLHNETVYGSHKEYVVKIETVNAKFDNEKIATVANPAYRVALTERLQQFNNDPKKAFTGGNALSKKPIWLDELHTKQVPEKVKTVSFETVYTIRKEISPDLKVNKVIDQKVRQILENRIKEFGGNTKQAFTNLDENPIWLNKEKGISIKRVTIFGVNNVESLHEKKNKEGKLILDENGNRQPVDFVNTGNNHHVAIYRDTAGNLQEKIVSFFEAVNRRNLGLPVIDKNYNAAEGWVFLFSMKQNEYFVFPNEKTGFNPNEIDLLDPDNYSLISPNLFRVQKISTKNYLFNHHLETKAIDGETLKHKKQLSGITYYFIQTPSKLQGIIKVRVNHLGQIVSVGEY

SEQ ID NO: 23876 - protein, 1450 aa, unidentified; identical to SEQ ID NO: 22860
  REGION 1..1450: note = Cas Enzyme sequence

SEQ ID NO: 23877 - protein, 903 aa, unidentified
  REGION 1..903: note = Cas Enzyme sequence
HIVKGLQGNLTKAAILNHLKGFENLLVFNLNIEQKSQEVFLVDKKSGEIIGNNTQKVIDNTFEQEPFYQLWHIIYSIADTEDCSKTLQLKFQLPKDIADKLASLDFTKSAFGNKSAKAMRKILPYLMEGFVYSDACSFAGYNHSNSLTKDENFKRELLEAIPTLSKNSLRQPIVEKILNQLINVVNAIIEKHGKPDEIRIELARELKQSKDERNETFASLSKRERENEGIKNRIATEYGIYGVRATRNTVIKWRLFHEINNDESKVNATCIYCGQPFGITDALRGSNVDIEHIIPKSRLFDDSQSNKILTHRKCNEDKGDRTAYDFMKSKGDDEFQIYLETIETLYKNKIIGKGKRDKLLMPGNKIPQDFIERQLRETQYIAKKAKEILEQVCYSVWSTSGNVTEYLRRIWGWGDVLMNLQLPKYSGIGLTEWREWETNDGQQHKQEVIKDWSKRDDHRHHAIDALTIACTKQGFVQRINTLNASSTRDGMKKEIDEMKKEFDKRKSLLENYFFSIKPFSTKQVENAASKILISFKAGKKVATIGNRKVKINGKKQIVQSGIIIPRGALSEESVYGKIKSTEKNKPVKYLFENPHLVFKPYIKVLIEERLLQHEGDIKKAIASLKKEPIYLDEAKTKILEYGTCFKDEYVIKYPIETIKAKDVGYIVDSKVKEIIKARLAQFNDKEKEAFKDLENNPVWYNEEKKIAIKTVRCFTGLSAVEAVKKDDMGNDIGFVKPGNNHHIAIYVDEHGKKQEHVCSFWHAVERKKFGLPVVIEDVKSVWDAVLENKGEFPDSFLSKLPFDTWVFEQSLQQNEMFILGLPKEDTEKAFLENNKSLLSNSLYRVQKLATTNYMFRHHLETQINDSNEAKLSKRFIHIRSIASLLECNPIKIKINNLGEIIKR

SEQ ID NO: 23878 - protein, 1668 aa, unidentified
  REGION 1..1668: note = Cas Enzyme sequence
MPLLSTRAKLIEAFASLRNNPYCDLLQYKSKNYLNMKIKNVLGLDIGTNSIGAALLKLPEHYEDYGKYGKIEWLGVRVLPDSDYKKAFELGQTNSPQVKTPAANRREKRGSRRLKHRYILRRSRLIKLFKTLGWLDESFPEDFKKAKQNNIDFKFQISDYLEISDQTYTEFYKEFGYSEEIIPNILKEIKYRKTFHKKNNPDLKLLPEDWIVYFLRNKALSKKIEIPELARIIYILNQRRGFKSSRKDLKQDTTVLPYEEFLVIKNNLNNPEYQSKTFETQFVSISKVTDVTQISDELDKKGNLKFLIKVDDPRMEAYEVARKNMPDWKDKEFTFLITQKIKKGKFEQLQPTTPGEDDWSLCTTALDEKIQKVHYPGKYFYEQLVKSHLQNKTFKIRQFPVYRKRYQSELEAIWIKQCELNPELGKLNSDKETLRKLASVLYPTQSKYSLPKLNEFLNNTLLHIISSDIIYYQRELKSQKNLINECRYEKRIGKERTEDGKFIATGKYGLKCIPKSSPLYQEFRIWQDIHNIRILKREEIIDGKIKLDIDQSKIYLDNQTKEALFELFDSKSNINETEILQLIKELHPENDIVISRKKDTPHSHRINLFSNRESLKGNETKSRYIILFKKADFNGDKILNNRDALFKLWHVDYAITSSDEKKSEKGITKALAHLLPDTPNKDKVIQLFLKLSELPKEYGAYSAMAIKKLLPLMRVGKYWKLEDINQITKNRIEKLCDGEYDESIPDDLRKKIAQWEKDNRSLDKIEDYYGLPTWLTCYVVYGTHSENEIEQCNNADEFNNKVIAQLKNNSLRNPVVEQVVRETLLLIRDLWKQLQEKNEKIDEIHIEMARELKKNSEEKQKIAEAQNKNFEERQRIKKLLKELMNDDFKLYNSEGEIEITHFTVKPNPDNLNDIQKFKLWRDLNPSTEEDWRKKVKDEKIPTEQEIKKYILWLSQNCRSPYTGKIIPLSQLYDSNKYEKEHIIPRAKLKNDSLNNLVIAERDINKAKDKELAANFISRCNGKCVYNGKEYKLLTYEEYVKHVNDAFKLNKAKRKNLLATVVPDDFIERQLNDTRYITRKVAALLRPVVGEPTKIIFTGGAITTELKQNWSLTKEWKKLMLPRFERLESITSASYIKENELDRNDIEINIPENEELDIKRIDHRHHALDALIVAATTREHIRYLNTLSAADTDEEHRKIKKAIINPVSQKIRDFKLPWEMFTKEAREKLEETLVTFKTSNKIISKPSNRYYTWKIENGKPEKKQKAQDPNKKWLAIRKSLFKEPLGSVWIKTIKEVSILKAFEIQINRQIKLKNAEKIIYEPYIYDKSARLIIKDILSKCQNDIDNPDALLKEIKAYLKKNKSGKTYILNGTAFDKIAIAEFVFYKTKRMSLNKKEYVEKLSIEKMANDLPYFNYLSEEQFETFNEQQQAYIVKAGLQVSDTKKMSPLNYLLLSHILEYNNIPKEAFSDEGLENLNKKAILYLGKEIKSITRLDGEVDVEDMFNGAFYETDKGANVYFVIYENELTKERTDFISVSAHKAIERIIKGEPIAEDREGYKKIILSPGDLVYVPTQNEIEEIKKDNLSIKELLRNKSLKEISSRVYQVKKFSGKQCYFLKSNISSLLLPYNSETKRGEFGSQNYQEFTDDKRKIVHVCYTIQTDRLGNIIFS

SEQ ID NO: 23879 - protein, 993 aa, unidentified
  REGION 1..993: note = Cas Enzyme sequence
AKPRRIARLARRQIWRRAARARKVFRTLQALDLLPPGEARSPEARHAMLHALDQELLRKYDLARDPVKAHLLPYLLRAWAVERPLERYELGRALYHLAQRRGYQTNRRAEADNNDEDNEKQRKIVQASIETLQQDLAGRTLGQFLATLDPCQRRIRQRWTSRSMYQDELARIWQRQAAALGLTEENRKQLYKAIFFQRPLRSARGLIGQCDLETGQRRAPLASLVAQEFRILQQVNHLRVCLPDHTERPLTDQERATLIQALMRQEELSCAEARKLLRLTKRGTKFTIELAGEKSLRGNRTQARLVAVLGPRWDTFTPQERDELVWDVIHYEKAAALARRVQKRWGLDPQTAEKLANVRLEAGYAAHSAAALEKLNERMRTGEAYATAKQAVYPHAHKLDRVVSRLPPVKEALGELRNPAVLRALTELRKVVNAILRRYGKPKAIHLELARDLRRSRKEREKISAEQAKREKARRDALQKMLCEFPNYQPKRGYDPAIEKILLAEECNWECPFTGQKINMQTLLGKNPQFDVAHIFPRRYLDDSFANKTLCYHEENRHRMLDRLPMEAYAGTPQRWQEILARVKKFQGPYAAEKLRRFQTEKVPDDFVSRQLNDTRHSTKLAAQYLGLLYGGPYDAQGHRRLVAVSGSITAYLRRAWRLGVHPGPDQAGQGKNRDDHRHHAVDAIVVALTSHATIQKLSTFAARSQPGQQRLITGDFQEPWSSFQRDVRQALEAIYVSFRAEHKLAGPLHAETNYSPPIPTPDGRVTHHVRKMLSKLTETEIRGDAIVDPVIRALVQKKFEELGGKQPDKVFADPANHPYLTARDGRRIPIHKVRIRARVNPVPIADDPARQRWVAPSSNHHAVIVAQLDPQGRETRWEDHVVTRLEAHQRLRQAGPRNQLIQRDWGPSKRFKFSLMLNDMLEMDAPGGGRQLCRVLGISKGDYELCLHYDARSQTEIARQKQRIRVNAEKLRLLRARKVVVTPLGDIQPAGG

SEQ ID NO: 23880 - protein, 1232 aa, unidentified
  REGION 1..1232: note = Cas Enzyme sequence
LELLSQDKKYIPDFYRSDLKDEFDKIWNTQKDFHKGSLTDELYDDLQGKAKAQTWAICKQPFDLKGVTLKGNAKEQRFKKYEIRVNGLKQKIDLEHLTIAFQEINNELNNSSGYLGAISDRSKELYFNNLTVGQYLYEQIEANPHTSLKNQVFYRQDYLDEFEKIWTTQAKYHEELTNTLKEKIRDITIFYQRKLKSQKGLLDFCQFESWDQEYFDKTTNKTKKRTVGRKVISKSSPLFQEAKVWQNLNNLVFINEDANEQIVINELDNHILDEIFQELNIRGNQKPNDILKLLKKHISEITKLSDWKTNFESIEGNKTNQVLYNAFYKIADAHGYGHDWDKKSVSEIKIELIAIFSDVGINPKILEFDSTLSGKELENQASFQLWHLLYSAEEDVKINEEDKIKYGNSDVGLKKNLQAKFGFAPEDTKIIASISFPQDYGNLSSKALRKILPELKKGYEYSDACKNVGYNHSKSLTADDLEKRILKDKLEILKKNSLRNPVVEKILNQTVNVVNQIIAQFGKPDEIRIELARELKKSAKQRSEMTKGIADATRRNDDIKKLIAKEFGIPNPSKNDVIRYKLYDELSTNGYKSLFSDRLIKIEDVFSKKIDIEHIIPKALIFDDSFSNKTLAYREVNLEKDKSTAFDYITNYKNLEVESYTERVETLFKSGSISRAKRMKLLMSAKDLPKDFIERDLRNSQYIAKKAKEMLFEVIRNVVSTSGSITDKLREDWDLINVMKELNFPKYEALGLIEIEKRYNKGTEKYTERKVIKDWSKRNDHRHHAMDALTVAFTKHNHIQYINNLSARYNTNHQMHSRILNIQSSITEMVSSNNGSKKRRFTAPMENFRTEAKKHIEAILISFKNKNKVVTQNINIYKAGKEERKKIQLTPRGQLHKETIYGKIKRPEPKATKINANFDFEKALTIMNPTQRELVINHLKTYNNKHKVAFSSKEIKSKPLIHKNKPLTEVICFEEIYTIRKGINPDNFKTQKNIEKVIDVKTKEILSKRLKEYNNDPKKAFSDLDKKPIWLNKDKGVKIKSVAITGVNNVEALHAKKDHFGKPILDENGNEIAVDFVSTGNNHHVAIYKDEKGNLHENVISFYEAVERSNQGLPVIDKFYNSELGWEFQFTMKQNEMFVFANDNFDVNEINLMDENNSTLISKYLFRVQKISTKNYMFTHHLETQATNSDDLKNKKMLSGLKYNSIRSPDSLSRLLKIRINHLGQIVQVGEY

SEQ ID NO: 23881 - protein, 1508 aa, unidentified
  REGION 1..1508: note = Cas Enzyme sequence
MRTILGLDLGTNSIGWAVINSVIKEQTEKIWIEMAGSRIIPMDAAILGDFDKGNSISQTAERTRFRGVRRLRERQLLRRERLHKVLKILGFLPEHYLKGIDFEKHTGKFLSGSEPKLPWVKDRWGKHSFLFQTAFNEMLADFAKHQPSLVFDGKKIPYDWTVYYLRKKALTEMISKEELAWILLNFNQKRGYYQLRGEEEEDNAGKSVEFYALKVLSVKATDEKKGRDIWYNVHLENGWVYRRSSNVPLDWEGRVKEFIVTTDLNPDGTPKLDKYGEVKRSFRAPKEDDWMLIKKRTEADIAGTHKTIGSYIYDALLQEPQQKIMGKLVKTVERKFYKEELNLILQKQCAFHAELQDRDLYMRCIEALYPGNEVQRRNIANRDFIYLLIDDVLFYQRPLKTKKSLIANCPYEENEYVNRKTGEIKTASLKCIAKSHPLFQEFRLWYFLSNIRVYQKEREVNGTLHLDVDVTTEFLKTEDDYVALFDWLNSRKEIDQKAFLRYPAFGLKKEINNYRWNYVEDKFYPCNETRHAILSRLEKAGIGIDFLSDEKETALWHILYSVSDKQEIEKALATFAVKNGLNESFVEVFKKFPPFKSEYGAYSAKAIKKLLPLMRCGKYWDMSLIDGTTKERIERIIAGECDESIGAKVREKAMNLSDISCFKRLPLWLACYVVYNRHSEDKKITKWETPADIDAYLAAFKQHSLRNPIVEQVITETLRVVRDIWKQVGKIDEIHIELGREMKNPADKRKRMTTQILENENANLRIKALLAEFVNPEYGVENVRPYSPSQQEILRIYEDAVLKGEEQIPEDIDVILKKINTSKLPTKSEFLRYKLWLEQKYRSPYTGELIPLAKLFTAAYEIEHVIPQSRYFDDSFSNKVICESAVNKLKDNQLGYEFIKNHHGQKVEVGFGKTVEIFSVDSYERFVKEQYAKSGIKMKKLLMDDIPEQFIERQLNDSRYISKVVKGLLSNIVREKNDSGEYEPEAVSKNILVCTGSVTDRLKKDWGMNDVWNSIVSPRFERLNALTETQCFGHWENKDGKKVFQTAVPLEYQKGFSKKRIDHRHHAMDAIVIACATRNHVNYLNNESASRNAKISRYDLQRLLCDKSRGDGNGNYRWIIKKPWTTFTQDAREALSGIIVSLKQNLRIINKTTNIYQHFDANGTRVYEKQKIGDSWAIRKPMHKDTVFGAVNLRKVKVVRLSVALDTPSMIVDKRVKNKVLELLSYKYDKKKIEKYFKENAFLWKELDIAKVAVYYFTENTTEPLVAVRKSLDSTFNEKKIASVTDTGIQKILLNHLKSKEGKAELAFSAEGIEEMNRNLLQLNDGKGHQPIYKVRVYEPRGNKFKVGVLGNKGAKWVEAAKGTNLFFAIYITEDGNRTYETIPLNWVIEREKQGLVPVPDRNEKGDKLLFWLSPNDLVYLPTEEERDFGRINEPIDRGRIYKMVSSSGNQCFFIPQSISNAIIPTKELGSNNKAEKSWDGEMIKNICIPVKVDRLGRIIEVKYRVNE

SEQ ID NO: 23882 - protein, 1392 aa, unidentified; identical to SEQ ID NO: 22249
  REGION 1..1392: note = Cas Enzyme sequence

SEQ ID NO: 23883 - protein, 1577 aa, unidentified
  REGION 1..1577: note = Cas Enzyme sequence
MCSQRNNPYCDLLQICICKNKEKSDERQKNCRKICRFEKNSLKQKNMDKKYILGLDLGTNSIGWAVVGTSKSEESHDFSGEIISSGVMTIPMDAATLGDFDKGNLKSQTAARRELRSMRRLYERSKLRRERLHKVLSLMGFLPEHYSAGLDRYGKFKDGQEVKLAWDKDENGKQSFIFRQSFCEMLDDFRRHRPELVAGEKEVPYDWTIYYLRKKALTQKIGKEELAWILLNFNQKRGYYQLRGEDEEERQAKTRQEFDRRTIVDIADTGEVYKGSKVLLVTLDDGRRGKIFQKEMPDWAGQQKDIIVTVDIDKDGKDKCNDKGEPDYRFKIPTEAEWETQWKLIKAKTQNDLDASGKTVGAYIYDALLQMPGQKIRGKLVRTVERKYYKDELRKILEKQKEFYGEFQDRELYEACLRELYPVNDAHRAEMNGRELTDLLMDDVLFYQRPLKSKKSLISDCPYEYHENMNHETGEVKRYPVKCIPKSHPLFQEFRLWQFVANLRIYQREAMVNGKLCVDVDVTANFLKNENDYAELFNELNKLKSIKQDKFLTAVLKLNKNEKSNYRWKYVEDKEYPCNKTHAAMLECLDKAKMNHDFLTAEREEALWHILYSVSDKAELEKALRKFIERQKCGCDESTEDAFVEAFRNMPPFEKDYGAYSAKALRKLLPLMRTGKSWSESAIDAATHERILRLIGGEYGENMPGKVKDRIANLKDVSAYRGLPLWLACYVVYDRHSEAKDICKWGSPDDIDGYLRKFRQHSLRNPIVEQVVLETLRTVRDIWRQLGHIDEIHIELGRNMKLSNEERQKQTKKILENENTNFRIKALLTEFMNPEFKMLEKDENPDLEIENVRPYSPIQQEKLRIYEETVLSEMKDVPNDIKDIIRKLGESDAGKRPTASQVLRYRLWLEQKYVSPYTGKAIPLAKLFTTAYQVDHIIPRKRYFDDSLSNKVICEAEVNSLKDCMLGYEFITEHGGEKVTLSGGGTVTIRTVHDYEQFVKTTYADNKKKMKKLLMEDIPDDFTSRQLNDSRYISKFIKSLLSNIVREEGELEDISKNMIACTGGVTDRLKKDWGVNDVWNEIILPRFIRMKEQTGNTGFTTLNSNNKTIPDIPLEYQKGFSKKRIDHRHHAMDAIVIACANRNIVNYLNNESANKKDGTTREDLQRLLCYKSKPDSNGNYRWIVKKPWGTFTQDVYASLKDIVVSFKQNLRVVSKMSNMYQHYENGKKRLVRQEKGDMLAVRKSLHKATYYGEVNLRKDDGGVSLKEAMRNPDVIVEKDLKRKLKELIAQGLTEKQIRKYFEDNKDVWQDVDLKKIKAYYFTKDKGRNFYSGRKLLDSSFTKKKIEDDVTDTGIRKILLSHLRQNGEDPKTAFSPEGIEQMNKNIVELNNGKYHQPIYKVRVCEESDSKFAVGRKGNKVSKFVEADKGTNLFFAVYEKEEQDKATGKTVWKRTFETIPLQDVISRAKKRLPPAPEKLNGSRLKFVLSPNELVYVPTAGELESGNINRPLDRSRIYKMVSCNDNRLFVIPYYVARVIVDKQEYHKNNKLEITDDGMSVKEVCIPLEVDRLGNINIKGK

SEQ ID NO: 23884 - protein, 1526 aa, unidentified
  REGION 1..1526: note = Cas Enzyme sequence
MKRILGLDLGPNSIGWALVKMENESDLLVETNHIEACGSRIIPMDAAVQGNFESGNSVSQTAERTGFRGIRRLRERCLLRRERLNRILDIMGFLPEHYASALTRYGKFKDADGCKLAWRKLEAGKYEFIFKDSFNEMLADFRRSQAEWLGDSAVVPYDWTIYYLRKKALAHAITKQELAWILLNFNQKRGYYQLRGEEEEDKEDKAEEYYALKVVEIRDTGEGKGKDTWFDIVLENGMVYHRAATEAPDWIGKVKEFIVTTQLDNEGKPKLDKDGNVRRSFRMPKDDDWALLKKKTEADIDKSGKTVGAYIYDTLLTNPKQKIKGKLVRTVERKYYKAELKQILDSQKRFIPELNDDKLYEACIDELYSSNDAYRESILNRGFTWLFIDNIIFYQRPLKSKKSLIDDCPYETHTYMDKTTGEMKNAGVKCVAKSNPLYQEFRLWQFVANLRIYERMKKVDGVLRTDVDVTDEFLGTTDDRVRLFEWLNDRKDVTQEVLFGTFFGKKKPKGKESVFPYRWNYVDKAYPCNETRGEMIKCLEKAGVCKDKLTTEMEKSLWHVLYSVDDKQELGRALETFADKHGFGEAFVETFAKFKPFEKEYGAYSEKAIKRLLPLLRMGKHWSADAIDEATRVRIDKIIDGEYDENIRSRVREKAMNLTDVTKFSGLPLWLACYVVYDRHSEAKDIVRWTSPDDIDGYLRCFKQHSMRNPIVEQVVTETLRTVRDIWRQHGRPDEIHIELGRDMKRTAEQRKAASQINVDNENANIRVKALLAEFMNPEFGIDNVRPYSPSQQDLLRIYEDGVLDSAGGDIPDDISEIMKKLSETDVKRKPTHSEVLRYKLWLDQKYQSPYTGRFIPLARLFTSDYQIEHIIPQSRYFDDSFSNKVICEAAVNALKDKMLGMEFIKEKHGQKVELGNGQTVDILSVEEYERLVARIYGNNKPKMRKLLMDDLPDDFIARQLNDSRYISKMVKTLMSNIVREEGEQEDISKNVVTCNGTITDRLKKDWGAGDVWNRIVLPRFKRLNEITESNRFTTMSSNGHEIPDMPLELQKGFKKKRIDHRHHAMDAIVIACTTREHVNLLNNEAAMSKNNANRYQLSHKLRRYEDTTIIRNGEAKRISVAKEFLKPWPTFTADMEQALRGIVVSFKQNLRVINKTSNKYQHFEEGKKKMVHQVKGDSWAIRKPLHKETVFGEVNLRVIREVSLKEALKRPRSIVDKDLKRKIVTMLELGYDEKRIKTYFLSNKDAWHDFNPSKIKVYYFTQEILDKSGNVKDRYFATRKPLDTSFSRKRIEDAVTDTGIQKILLRHLDACGGDSEKAFSPEGIEAMNQDIVNLNNGKQHQPIYKVRVYEKADKYAVGKRGSKAKKFVEAAKGTNLFFAVYETEETDKATGLPKKRRTYATIPLYEAVRRAKEGLPVAPEDANGNSPAFVLSPNDLVYLPTREDIDSGQISLPLDKSRIYKMVSSSGNQCFFVSFTVASAIVDKVEFSSLNKMERAITGEMIKETCVPLKVDRIGNIVELNGKKL

SEQ ID NO: 23885 - protein, 1528 aa, unidentified
  REGION 1..1528: note = Cas Enzyme sequence
MKKILGLDLGTNSIGWAVIAENEEKKEILGIGSRIIPMSQDVLGKFDSGISKSQTAERTSFRGVRRLRERYLLRRERLHRVLNLLGFLPVHFTQSIDFEKRLGKFQPGTEPKLAWKEVEQNQFEFIFKTSFNEMVKEFRLNCPGLFGIKGNGEERKIPYDWTIYYLRKKALQAKIEKEELAWLLLNFNQKRGYYQLRGEEEEENLNKTVEFHKLKVVEVTAEEPQKGKTDIWYNVILENGWIYRRSSKIPLFDWKEKSKEFIVTTDLNDDKTIKKDKDGNEKRSFRAPSDDDWTLLKKKTESDIEKSHKTVGCYIYDTLLKNPAQKLIGKLVRTIERKFYKQELIAILEKQKEFHPELTDTEFYQACLKELYENNEALRNSKAGGDFTYLFLSDLIFYQRPLKSKKSLISNCKYEFRTFKDVKTGECKKDPIKGIAKSHPLYQELRLWKFVKDLRILEREKMVDGKLKMDVDVTFEFLKSENDFVNIFDWMNDKKEVKQDSFLASYFKFKKKKGDDKLAYRWNYVEDKEYPGNETRATILNRLSKVNNVPENFLDKEKELALWHILYSVEDKLEIEKAMKSFAIKHHLDTSFAEIFKKFPPFKKEYGAYSEKAIKKLLPLIRMGKYWSKDNIDENTKKRIEKIITGEYDENIRNRVREKAINLTEVVDFKGLPEWLACYIVYDRHSEASELTKWKTPEDLAWFLHPQNPEGFKQHSLRNPIVEQVITETLRTVKDIWKQHGDFTEIHLELGREMKNPADKRKTMTAQITENENTNQRIKYLLAELANHNDVENVRPYSPSQQELLKIFEDGVLNSGIEIPEEIAKIVKTSQPTQSDLIRYKLWIEQQYRSPYTGEVIPLGKLFTSDYQIEHIIPQSRYFDDSLSNKVICEAEVNKEKDNALGYEFIKNNEGRIVDLNFGKKAKIFTIAQYEDFVKQHYSKSRGKMKKLLMEEIPEAFLERQLNDSRYISKVVKSLLSRIVREDGEQEATSKNVISCTGGVTAILKQDWGLNDVWNRIVTPRFERMNELTGTTQFGQWTNKEGKRVFQTDMPLELQKGFTKKRIDHRHHALDALIIACATRSHINYLNNEHARHKDDETRFDLRNKLRRIEEIEVDRMENGQKIRRKIKVAKEFIKPWDTFTQDAQTALEAIVVSFKQNLRVINKTVNKYQGFEDGQKVIKKQTKGDSWAIRKPMHKDTVAGIVNLRFKKTATLSAAIDQWEMLVDKNLKTKIKQLINEGFDKKKILKFFAEQENKWMGKAISKVDLYYFSNENEVLVASRVKLDDSFNAKKIESITDTGIQQILLKHLSKFNEEKAGKTIEHPELAFSPEGIDELNKNIVQLNNGKFHQPILKVRTYEPKGNKFNVGTTGNKNKKFVEAAKGTNLFFAIYQNSEGKRSYESIPMNIVIERQKQGLSPVPDTNEKGETLLFHLSPNDLVFIPSEEVKNHFQNDNSKNSYNFNGYSIYKMVSSSGTQCFFVRHEIASTIWNKVEFSALNKTEKSIDGIMIKDVCWKLEVDRLGNIIKIIK

SEQ ID NO: 23886 - protein, 1111 aa, unidentified
  REGION 1..1111: note = Cas Enzyme sequence
SVSGYLSNIGEHSKSLYFNHQTIGQYLMESLARDPNMSLKNTVFYRNDHIAEFDAIWATQARYHKELTAELQDELRDIIIYYQRPLKSKKNLISICELEQKEIEIEKNGKIITKVVGNKVIPRSSLLFQEFKVWQTLNNVVVSLKGVNKKVTKSPCLNFGEDELYIAGSRQLTADEKALLAEELQVKGQLTKSEVISLLFGSAKKLDLNYKVLDGDKTMSQLYVAYSKILELSGHVALNFNESAVQIKEQAYEEFKALGWNTDILDFDSSKVLDSQGSYRLWHLLYSYADDSSNSKVGALVERISEVTGIAKEYCDILSDIAFIDDYGNLSAKAIKRILPYMKEGNQYDVACLYAGYKHSKSSLTKDEIARKQLKEHLEILPKNSLRNPIVEKILNQMTNVVNALVDEYGAFDEIRVELARELKKSATERKQLNDSINALTRENEVIRQTLIKEFNIAYPSRNDIIRYKLYEELKPLGYHTLYSNKYIRKEQLFSKDIDIEHIIPQARILDDSISNKTLEFRDVNIEKGNSTAYDYVKEKYGEEKIEEYAKRCEECFKDKKTKLRKLMMSESEIPSDFVERDLRNTQYISKKALSMLSSISRRVVATSGTITSKLREDWQLIDVMKEINWAKYESLGLVEYHTNRDGQQVGQIKDWTKRNDHRHHAVDALTVAFTKDVYIQYFNNKNASDKPNTNEYAIRAKYIKEGKVLPPMPLSVFRTEAKKHIENILVSVKAKNKVVTKNVNKVRIGSTVKEKVQLTPRGQLHNETIYGSHYEYECKEEKVGATFNEEKILTVCKGVYRDALLKRLNENGGDAKKAFSGKNSLDKRPIWIDAMHTLAVPSKVNTVQAKLRFTVRKPITEKLKISKVVDKQIRKILEDRVNQYGTEKDAFSNLEQDPIWLNKEKGIKIKRVTIYGIADGQALREKRGQDGTVLKEHLPVDYVSTSNNHHIAIYRKPVLDKQGAVKVDDAGNEVTELVEVVVSFYEAVARAIHGLPIVNKEYRCSEGWKFLYSMKQNEIFVFPNEKTGFDPHEIDLLDSNNRALISPNLYRVQKISSKYYNFRHHLDTTVEENKELRGITWNRIQSLDKMDKIVKVRINHIGQIVAVGEY

SEQ ID NO: 23887 - protein, 1478 aa, unidentified
  REGION 1..1478: note = Cas Enzyme sequence
MDAAILGDFDKGNSKSQTAERRGYRSVRRIRERELLRRERLNRVLDILGYLPEHYSKALDRYGKFSSSEEECKLAWRKDESGKYAFLFQSSFEEMIADFAKSQPSLVANGKKVPYDWTIYYLRKKALTQKIEREELAWILLNFNQKRGYYQLRGMDEDEEESDKKPKTRQYFDRQTITRVTDSGALYKGLKILIVELADGSKGKVFRRDIPDWIGQEKDIIVTIDLDREGNDKYEDDGSLSCRYNIPTDAEWDTKWALVKAKTQQDLDKQGKTVGAYIYDTLLQRPSQKITGKLVRVIERQYYKDELIQILKSQIRFHSELRDNEMYAKCVEALYASNEAYRNSIASRDFVYLFVDNIIFYQRPLKSKKSLIDNCPYEENRYIDKDGAEHKVPLKCIAKSHPLFQEFRLWQFLSNLRIYQKERRNSALNRIETDVDVTQDLLPNQQSYAALFEWLNEKKEIGMDALLKYPPFGLKKDTSNYRWNYVDDSSKKYPCNETKAQIMSFLSKAGVPESFIKEDGVEESLWHILYSVEDKQELTKALKSFADKHSLSEEFVSMFKKFPAFKKEYGAYSAKAIKKLLSVMRMGSYWNEHDIPADLLSRINKIIDGEVDDNIDIRTRERVSGLKSISDFSALPVWLACYVVYGRHSEAKDIQHWKNPDELDSYIKSFKQNSLRNPIVEQVITESLRTVRDIWKQVGSIDEIHVELGREMKNPADKRKKMTQQILENEYTNLRIKALLVEFLNPEFDIENVRPYSPGQQDILRIYEDGALNGASEVPEDIKEIISKFNQADIKKRPTHSEVMKYKLWLEQKYRSPYTGAPISLSKLFTSAYEIEHVIPQSRYFDDSLSNKVICESEVNKLKDNNLGYEFIKKHHGEIVTLSGGKTVKIFNEAEYETFVSENYSRNATKKNKLLLEDIPEKFIERQMNDSRYISKVVKGLLSNIVREDDEPEATSKNLIVCTGGVTDRLKKDWGINDVWNEIILPRFKRLNEMEGSTRFTAVNGNGKLVPAMPLELQRGFNKKRIDHRHHAMDAIVIACAGRNIVNYLNNVSASKNATTSRHDLQAILCTKTKTDDNGNYRWLMNKPWDSFTQDVKFALNHIVVSFKQNLRVINKTTNVYQHFDGNGHKVSEKQTKGDSWAIRKPMHKETVFGEVNLKRTKAVQLSVAIKKPERIVDKILRERIMKLLRSKFNAPRIKAYFEERKGEWGETNLAKIEVYYFTKETNDRFFAVRKSIDTTFDEKKINESITDTGIQKIMLNHLKANDGKADIAFSPDGIEEMNRNIVSLNDGVAHKPIYKVRVYEQANKFAVGETGNKRSKFVEGAKGTNLFYAIYENKSTDSETGQIVTKRSYATIPLNIVIERQKLGLPSAPENEEGLAPRYVLSPNDLVYLPTAEEIECGHISLPINTDRIYKMVSSTVGRSFYIKYEVASSIVDKYEYTSMNKMERAITGEMIKETCIPISIDRLGNIKINDKL

SEQ ID NO: 23888 - protein, 1402 aa, unidentified
  REGION 1..1402: note = Cas Enzyme sequence
MKKILGLDLGTNSIGWAVVQESETDEEASSIVQLGVRIVPLSIDETQYFEKQKGETLNAQRTVKRSMRRNLQRYKLRRADLINTLKREQWITAETLLSEQGPRTTFETYRLRARAAVEEVSLSELARILLMLNKKRGYKSNRKAKKADTDADGAFVSGLDIARALYDQGVTPAEYVLPRLQQGINFIPDFYRSDLQQEFQRIWDFQKKFYPEVLTNAIREEVTGKNRSQTWAILAKHWHTEVKDASGQTVLCPLQGIKRTTKGRDLKVENYVWRVQALKRPMPLEELAIVLQEVNGAISTANGYLGAISDRSKELYFRHQTVGQYLWNMIETQPGVSLKNRVFYRQDYLDEFETIWTCQQQYHTELTDALKRELRDTIIFYQRRLKSQKNRIAYCEFEQQQKTIEVDGKPKTIIIGSRAIPKSSPLFQEFKIWQVLNNLKVSRVEKSIAKGKRASTPALGDDLREGVERPLTLDEKRSLATELSIKDKLTKTEALKCLFGKSAGLDLNFKVIEGDRTGARLYQAFNTLIEYSGHTPFDPKAPATETLAQVEAIFQALGWNTSVLHFDSAQPLDNQPYYRLWHLLYSFESDSSATGDQALLHKIADLCGIDLAYASALSQVTFAEDYGSLSAKAIHKILPYMKEGTPYDVACLYAGYRHSASSLTREELDAKVLKDQLAPLRPNELRNPIVEKILNQMVHVVNAIIQAHGPLDEIRVELARDLKKSAQERQEATEGIAAATKVNDDVRKVLESEFHLEHVSRHDILLYRLYDELKANGYHTLYSNQYIPREKLFSGEITVEHIIPRARLFDDSFSNKTLEYKDENIEKGKRTALDFVREKYGEEGVKRYRDACERCLKKDSTKYRKLMMSQTEIPEDFIDRDLRNTQYIARKSREMLSDVCRRVVATTGSITDRLRDDWGLVDVLKELDWDKYHALGLTETYRTRDGHEVRKIQEWTKRNDQRHHAMDALTVAFTRDAFVQYFNNMNAGENEASAIYGIKQKYVREAHVLPPMPRAAFRAEAKRHLEEVLISYKQKNKAATFRTLSTPDGALHHFCTPRGALHEETIYGRNQEYKTNEVKVNAAMDEPTIQTVCNRRYREALLARLHACQDDPKKAFTGRNALDKNPLWLDAEHTHSVPSAVKVAHLESYYTVRKAIGKDLKIESVVDVRVRQILQQRLDEYGGDATRAFADLEHNPIWLNRERGISMKRVTIHTTVKGCLPLHALKDKDGRYLLSDDGRRQQTDFVKPGANHHIALYRRPVIDKEGRKSYVVEEVVVSFFEAVARALNGDAIIDRNYMAHEGWQFLYSLQQNDYFIIPTETFSPADIDLLDPANLTVISPHLFRVQKLSSKYYNFRQHLDTTTDEAAQLRGITWQRITNLQTMEKLIKVHVDRLGHIVRVGE

SEQ ID NO: 23889 - protein, 1524 aa, unidentified
  REGION 1..1524: note = Cas Enzyme sequence
MKKILGLDLGTNSIGWAVVNEPDEPQEPGSTASPHPSIAAAGSRIIPMDAAKLGDFEKGKTGTQANERTISRSVRRLYERHHLRRDRLHRVLDVMGYLPEHYAAALDRYGHFLDHGEPKLPWVPQPDGHPQFLFRDSFDEMLADFYHHCPDLAASGQKIPYDWTLYYLRKKALTAPIDKYELAWLLLNFNQKRGYSQSRDEATKGDTEDKPATTRQYFDKQVVTEIIDTGQVYKNNKVLIVVLADGSRGKIFKKEIPNWVGQEKNIIATVDIDKQGRDKHDDDGQLKCRFRIPTESEWDSEWALVKLKTERDLEASHQTVGAYIYDALLHNPAQKIKGKLVRVIERKYYKEELRQILNTQQKYHPELTDRALYADCIRELYPTNDAYRESIAGRDFIYLLVDDILFYQRPLKSKKSLIADCPYEQHRRRVKTPEGTEEYRPVAIKCIAVSHPLYQEFRLWQFVGNLRIFRREQVDESTGRTRFDVDVTSRFLPDEESRAALFDWLNDRTEVTQKELLGYPAFNLGKTTSAYRWNYVDDDKKAYPCNTTRGNMLAALMKAKLPATLLTAELEEALWQVLYAINTPDELKKALRTCAEKHGLAPEAIVQAFGKFKPFAKDYGAYSAKAIKRLLALMRMGHHWSAEAIDPATLIRIDHILTGEYDEDIKNRVREKAIHLTALSQFRALPLWLACYIVYNRHSEAQDAARWTTPDDIDTYLRNFRQHSMRNPIVDLVVLETLRTVRDIWRQEGHIDEIHIELGREIKKTAKERARMTEQITENENTNLRIKALLTEFFNPEYGIEDVRPYSPSQQELLRIYEDGVLSDPTIEQPDFVKEILAKFGQREASKRPTSTDIMRYKLWLEQKYRSPYTGQFIALSKLFTSAYEIEHIIPQARYFDDSMSNKVICESEVNKLKDKSLGYEFIQNHHSEKVYLAAEGRSVEIFSLAAYEAFVKEHYSANRGKLQRLLMEDIPDDFIARQLNDSRYISRMVMTLLSNIVREEGESEAVSKHLIPCNGNITDRLKKDWGIGDVWNRIILSRFERMNDVTKTHLYTTQNTEGHTIPCMPLDQQRGFNKKRIDHRHHAMDAIVIACTTRNMVNYLNNESARAGARISRYDLQVQLCDKGRILRAPWPTFAADVYNTLSHIVVSFKQNLRVINKTSNHYEHFDPETGRKRMVAQTSSTKGVMFSVRKPLHKATYYGLVNLRLMKTVPLKEALARPQDIVEKDFRIQLLQLQRNGYNEEQIVGYFNEHNDIWHEIDLEKIKVYYYTQSESDGLYTAVRVPLETSFKREKIETITDTGIQKILLRHLDSYRGVAEEAFSPEGIETLNANIQTLNDGKPHKPIYSVRLYKKEARIPVGTRSCKGAQYVKVAEGTNLFFAIYEQEQVNKKTGLRKRFFETVQLRDSIDRMKQGVLVAPPKDSMSVKFVIVPGDLVYVPTQEEIQKKQLQFPLSVDRIYKMVSANSTRCTFIKATVASPIVNEKEYGRHNKVECLDSGESIKEICIPIRIDRLGNILPSEELKL

SEQ ID NO: 23890 - protein, 1037 aa, unidentified
  REGION 1..1037: note = Cas Enzyme sequence
LRDIIIYYQRPLKSKKNLISICELEQKEIEIEKNGKIITKVVGNKVIPRSSLLFQEFKVWQTLNNVVVSLKGVNKKVTKSPCLNFGEDELYITGSRQLTADEKALLAEELQVKGQLTKSEVISLLFGSAKKLDLNYKVLDGNKTMSQLYVAYSKILELSGHIALNFNESAVQIKEQAYEEFKALGWNTDILDFDSSKVLDSQGSYRLWHLLYSYADDSSNSKVGALVERISEVTGIAKEYCDILSDIAFIDDYGNLSAKAIKRILPYMKDGNQYDVACLYAGYKHSKSSLTKDEIARKQLKEHLEILPKNSLRNPIVEKILNQMTNVVNALVDEYGAFDEIRVELARELKKSATERKQLNDSINALTRENEAIRQTLIKEFNIAYPSRNDIIRYKLYEELKPLGYHTLYSNKYIRKEQLFSKDIDIEHIIPQARILDDSISNKTLEFRDVNIEKGNSTAYDYVKEKYGEEKIEEYAKRCEECFKDKKTKLRKLMMSESEIPSDFVERDLRNTQYISKKALSMLSSISRRVVATSGTITSKLREDWQLIDVMKEINWAKYESLGLVEYHTNRDGQQVGQIKDWTKRNDHRHHAVDALTVAFTKDVYIQYFNNKNASDKPNTNEYAIRAKYIKEGKVLPPMPLSVFRTEAKKHIENILVSVKAKNKVVTKNVNKVRIGSTVKEKVQLTPRGQLHNETIYGSHYEYECKEEKVGATFNEEKILTVCKGVYRDALLKRLNENGGDAKKAFSGKNSLDKRPIWIDAMHTLAVPSKVNTVQAKLRFTVRKPITEKLKISKVVDKQIRKILEDRVNQYGTEKDAFSNLEQDPIWLNKEKGIKIKRVTIYGIADGQALREKRGQDGAVLNEHLPVDYVSTSNNHHIAIYRKPVLDKQGAVKVDDAGNEVTELVEVVVSFYEAVARAIHGLPIVNKEYRCSEGWKFLYSMKQNEIFVFPNEKTGFDPHEIDLLDSNNRALISPNLYRVQKISSKDYYFRHHLETNVDTNNDLRGITWKRISSLDKMDKLVKVRINHIGQIVAVGEY

SEQ ID NO: 23891 - protein, 1131 aa, unidentified
  REGION 1..1131: note = Cas Enzyme sequence
LQDAALYKACIEELYAANDAYRNSIAKHDMVYLLVDDVLFYQRPLKSKKSLISNCPYEYHLYTKDGEEQREYLKCIAKSHPLFQEFRLWQFLSSLRIYKKETKADIDVTDQFLASDAARAELFSWLNDRKSIDQKSLLKYPGFKLKKDADMYRWNYVEDKSYPCNETRALFLKAINKAGLNGAFLTTDVEEALWHILYSIADPKELAKALRRFAEKHGLQEEFVDAFKNLPPFKAEYGAYSAKAIKKLLSVMRLGKYWSAENIPTSVRKQIDDIVSGDCSEKLKEQMEGASLLNGHVEQFSGLPVWLACYVVYGRHSECKEIQQWKSPEDIDNYLNHFKQHAMRNPIVEQVVMETLRVVRDIWKQYGKIDEIHIELGRNLKEPADKRKKMTERILENERTNMRIRLLLMEFANPDYKIEGVRPYSPSQQELLRIYEDEVLQREEVDEEILEILKKFQQADSAKQPTSSEIKRYRLWLEQKYRSPYTGKPISLARLFTSDYEIEHIIPRARYFDDTLNNKVICESEVNKLKKNKLGYEFIKHRHGEKVQLSHGGTVTIFTEAEYEEFVKEHYAKNRKKCQNLLLESIPENFSSRQLNDSRYISRVVMTLLSNLVREDGEEEAISKNVVPCTGSVTDRLKKDWGINDVWNQIILPRFERMNTFGIGSFTSTTANGNLIPDIPLQYRQGFNKKRIDHRHHAMDAIIIACANRNIVNYLSNISASESGKTARGDLQRLLCEKHKLDGSNYEWLIRKPWDTFTHDVYEALSTTVVSFKQNTRIISRCTNHYERIVNGKKVRVPQTKGEMIAVRKSMHKKTVFGEVNLVRTKFVSLNDAINSPIRIVDKYLRDTIQNLLAEGGDAKKIKAYFAAHNTEWEAHTQKAKIEVRYFTQETNERFYAVRIPVDQSFTEDFIKKGVTDTGAQKILLRHLANCGGDSNVAFSPDGIERMNRNICELNDGKFHQPIYRVRKYESANKYPIGTKGNKRAKFVESAKGTNLFFAIYEQDGARSYDTIPLRTAVERAKKRLSIAPENEQGISAKYVLSPNDLVYLPTQEDIANGKIAFPLCMDRIYKFVSTSQGKADFVNAAVASSIVDKVEFGSHNKFGRAPSGEMIREICIPLQVDRLGNVTTKE

SEQ ID NO: 23892 - protein, 1504 aa, unidentified; identical to SEQ ID NO: 22929
  REGION 1..1504: note = Cas Enzyme sequence

SEQ ID NO: 23893 - protein, 1007 aa, unidentified
  REGION 1..1007: note = Cas Enzyme sequence
LKYPAFNIKKDVDNFRWNYVEDKTYPCNETRSLILSCLNKANLSEDFLSYQKEEALWHILYSVNDKQEIVKALQTFARKNGLDGTFVDAFKKIRPFNKEYGAYSAKAIKKLLPLMRTGKHWNVESIDGKTKERIDKIITGEYDEKISNRVREKAIYLSDISCFKGLPLWLACYVVYGRHSEQKEITKWETPDDIDAYLSTFKQHSLRNPIVEQIIMETLRVVRDIWKKAGSIDEIHIELGREMKNPADKRKRMTAQILENENANLRIKALLTEFMNPEYEIEDVRPYSPNQQEKLRIYEDGALNAAEQVPEDIETILKKFKENKQPTRSEFLRYKLWLEQKYRSPYTGELIPLGKLFTEAYQIEHIIPQKRYFDDSFSNKVICESAVNSLKGAQLGYEFIKEHHGEKVETGFGKVVTIFSVTAYEQFIKEHYAKSKAKMKKLLMDDIPEQFIERQLNDSRYISKVIKGLLSNIVREKDESGEYEQEAISKNVLVCNGSVTDRLKKDWGMNDVWNNIVYPRFERLNTLIGKECFGHWENKNGKRIFQTEVPLEYQKGFSKKRIDHRHHAMDAIVIACATRNHINYLNNASASKNAQISRYDLQHLLCDKTKTDDKGNYKWVIKKPWDTFTQDTKGILDNIIVSIKQNLRVINKTTNIYQHFDTDGKRTFYKQTKGDSWAIRKPMHKDTVFGIVNLRKTKEVRLSIALDIPYLIVDKKVKKKVFQLLKYKYEKKRIEKYFKENACLWKELNVAKVPVYYFTESSSERMVAVRKTIDTSFNAKKIQESVTDTGIQKILLKHLEQKDDKADLAFSAEGIEEMNRNIIALNDGKKHQLIYKVRVYEPLGNKFNVGTTGNKGKKFVEAAKGTNLFFAIYRTEDGKRIYDTIPLNIVIEREKQGLLPVPDKDEKGNTLLFWLSPNDLVYLPTEEEREFDRINEPIDKKRIYKMVSSSGNQCFFIPVNIANAIVPILELGANNKAEKSWEGNMIKSICIPIKVDRLGNIIKIKKV

SEQ ID NO: 23894 - protein, 1203 aa, unidentified
  REGION 1..1203: note = Cas Enzyme sequence
MGSRIIPLSVDDKDEFSKGNAISKNQNRTTKRTQRKGYDRYQLRRKDLKELLNKLVMFPDDTLMKLSSVELYGLRDKALKEKIELVELGRVLYHLNQKRGYKSSRSDANLDKKDTDYVAEVKSRHQNIKDAGLTIGQYFYEELKKNEFYRIKQQVFPREAYVEEFNAICKKQKQYHPILTDELIATFRDEVIYYQRKLKSQKGLVNICEFEGEYRKDAKGKTLFTGPKVSPKSSPLFQVCKIWETVNTISLKNKNGETLSITNEQKQLLFTYLDINERLSQAELFKLLNLKKDDGWYGNKHIGKGLQGNLTKAAILNHLKGFENLLVFNLNIEQKSQEVFLVDKKSGEIIGNNTQKVIDNTFEQEPFYQLWHIIYSIADTEDCSKTLQLKFQLPKDIADKLASLDFTKSAFGNKSAKAMRKILPYLMEGFVYSDACSFAGYNHSNSLTKDENFKRELLEAIPTLSKNSLRQPIVEKILNQLINVVNAIIEKHGKPDEIRIELARELKQSKDERNETFASLSKRERENEGIKNRIATEYGIYGVRATRNTVIKWRLFHEINNDESKVNATCIYCGQPFGITDALRGSNVDIEHIIPKSRLFDDSQSNKILTHRKCNEDKGDRTAYDFMKSKGDDEFQIYLETIETLYKNKIIGKGKRDKLLMPGNKIPQDFIERQLRETQYIAKKAKEILEQVCYSVWSTSGNVTEYLRRIWGWGDVLMNLQLPKYSGIGLTEWREWETNDGQQHKQEVIKDWSKRDDHRHHAIDALTIACTKQGFVQRINTLNASSTRDGMKKEIDEMKKEFDKRKSLLENYFFSIKPFSTKQVENAASKILISFKAGKKVATIGNRKVKINGKKQIVQSGIIIPRGALSEESVYGKIKSTEKNKPVKYLFENPHLVFKPYIKVLIEERLLQHEGDIKKAIASLKKEPIYLDEAKTKILEYGTCFKDEYVIKYPIETIKAKDVGYIVDSKVKEIIKARLAQFNDKEKEAFKDLENNPVWYNEEKKIAIKTVRCFTGLSAVEAVKKDDMGNDIGFVKPGNNHHIAIYVDEHGKKQEHVCSFWHAVERKKFGLPVVIEDVKSVWDAVLENKGEFPDSFLSKLPFDTWVFEQSLQQNEMFILGLPKEDTEKAFLENNKSLLSNSLYRVQKLATTNYMFRHHLETQINDSNEAKLSKRFIHIRSIASLLECNPIKIKINNLGEIIKR

SEQ ID NO: 23895 - protein, 985 aa, unidentified
  REGION 1..985: note = Cas Enzyme sequence
RAQIQNRLDKSKNISETLLTKENEESLWHILYSVEDKIDLEKALKTFANKHGLADDFVENFKKFPPFKKEYGSYSAKAIKKLLPLMRIGKYWNEDDFHVLTKDRIDKIINGEYDENIRDRVREKAINLKGIQNFKGLPQWLASYIVYDRHSEDGESVKWKTAKDITHLEQHSLRNPIVEQVINETLRIVKDIWMKYGNGEEDFFNEIHIELGREMKNPSDKRKEMTNRMNENENTNLRIKALLAELLNEGIVENVRPYSPMQQEIFKIYEEGVLNAEEGNIPDNIMKISKQAQPSSSDLLRYTLWLQQKYRSPYTGEIIPLTKLFTPAYQIEHIIPQSRFFDDSLSNKVICESEVNKDKDNLLGYEYIKANYGKAIELSGGKEIRIFTVEAYEKFVKENYSKSRGKLKKLLMDDIPESFIQRQLNDSRYISKVVKNLMSNIVREAGEQESVSKNIITCTGAVTSILKQDWGLNDVWNELITPRFERLNKLTKTTDFGDLTKKGGKHIFQTQVPIALQRGFNKKRIDHRHHALDAIVIACASRNHINYLNNESAVGKKTKEEKDKKRYDLKHKLCYKKYNEESNQNYKWIFNKPWDSFTQDTKDTLYSIILSFKQNLRIINKSINYYQAWRKDEHGELKKKLVKQTKGINWAVRKPMHKDTVSGLVKLKFKKKVSLSIAIENWTMLVDKKLRNKIKDLIKLEYDKKKTLNFFKDLNYKWLDDDISKVEIYYWDEENVASRVKIDDSFNSAMIKCITDSGIQRIMSNHLKKFNEENNSKIIEHPEQAFSIDGIDDMNKNLIELNGGKKHHPIQKVRTFEPKGNKFNVGENGNKMHKYVEAAKGTNLYFAIYKNEAGKRNYVTVPLNVVIERQKQGLPSVPEKNDDGYLLFTYLSPNDLVYVPTLEEIENKCMANLTNLNQVQTTRIYKFVSCTGNEGHFVPHSYAKEIVKNEMGTNNKSQNSLDGIQIKMHCIKLNVDRLGNVRTSK

SEQ ID NO: 23896 - protein, 1380 aa, unidentified
  REGION 1..1380: note = Cas Enzyme sequence
MKKILGLDLGTTSIGWAFVHEAENEQEKSTIINTGVRVVPLSTDEKINFNKLNAVTAAAHRTASRGARRNLQRYKLRRQELLSILQGHGFISKNDILSENFENSTYFTWKIRAHAASDPISKKELAMVFLAINKKRGYKSSRKANNQEEGQLIDGIGIAKKLIEENLTPGQFNHKLKTEGSRYLPDYYESDLHKEFEKIWKTQSIYYPEILTDTHLKELDGRTNKATAYYFEKVMLIERAENKGKEKKLQEYEWRSDAVKQQIPLEQIAYILTELNNDINKSSGYLSAISDRSKTLQFNNLTVGQHQYAKLFGMPLASQKNQVFYRQDYLDEFNTIWELQSKHHPELTDDLKVEIRDVIIFYQRRLKSQKGLISICELESRKRTTTVDGKTITKLTGPRVAPKSSPLFQSFRIWSNINNIVVTSKTDKKQIYQLDEETKKALFKELSWRSSMTDNQFLTWLFAGSKEKVGDYEIKYGKIEGNRTNEELLNAYLKITVLEGYDINTKQDKVDVVKDVRSCFKEFGIKDSLFHFKWDLQDTTMIATQDSYELWHLLYSYEDDSSNTGLDSLNNVLIEKYGFATNHTGIMSSVTFEKDHASLSARAMRKILPYLEDGMVYSDAATAAGYNHSRSVTKEENLKRELKDQLEILTKNSLRNPIVEKILNQMINVVNAILAEPSLGRPDEIRIELARELKQTAKQRSDATTQIAKATREHEEYREIIKKEFGLPYVSKRDLIKYKLYRELKSNGYKTLYSNTYIKPDELFSKKFDIEHIIPQSIRLDDSFSNKTLELRDINIEKGSQTAIDYCQRKGYEDRFIKTVQTLATVIDGISPRKMLKLFTKIEDVSTDFNERDKNNTGYISRKANEILIDVTRNVYATSGTITSMLRSDWELIDVLKELNWSKYDTLGLTYYETNKDGQKLPKIKDWSKRNDHRHHAMDAITVAFTKPALIQYINNKSAKSKGNIIISNIEEKFTYQDKDGKRRFVKPAPDIREQSKKALASILVSHKAKNKVVTDNINIIKIKGGTIKKKQSTPRGQLHLETVYGASKFYETKLETINASFDEQKINTVSNKQQREALLSRFRESGNDSKQAFTGKNALSKNPLKLSNGDELPLKVQTVALQTRYTIRKPINADNFKDEKTIAKIIDIGSRNIVLKRFLESGKNSKAAFSNLDENPMWLNKEKGICLKTVTILGISNAVSLHVKKDMNGMPLNDPTGKEIPADFVNTGNNHHLAIYESPTGDWDDNVVSFFDAVTAVNNKQPAVAPRNEKGWLLKFSIKQNETFLIPPSEDFFKDEDLKDISNKSALSPYLFRVQKFSKLQYGNSYVREYMFRHQLETELNDKKVLNGIAFNTFKSLKPMKGIIKVRLNHLGNIVETYT

SEQ ID NO: 23897 - protein, 1153 aa, unidentified
  REGION 1..1153: note = Cas Enzyme sequence
MGNKFVLGLDLGVSSVGYALVKEGSDNQESEIIKMGVRIVNSDPDFHGKFEKGQAASKNASRRQKRQIRRGYQRYKLRRNQLINVLEDHNLMPGFALRFEKSKLDLLRLRAKAATEQISLEEFGRVCMLLLRKRGFLSNRKANAEESETDFKQKLAERHAELGQKTIGQFLYSKVSENPDFSTKGLVFLRQAYQIEFDQIWQTQRQFYPHILTGGPEAKSRDSLYFKLAVETLFYQRPLKSQKHLIGFCRYETQKRVAHSFSPFYQQFRIWKQINDCVLTFPDGSMRHFSNDERGILFLELNNPNSAIVPKTGIVKPSKIFQLLGLDKKTQLNFADGINANKLHLKLNSAFQKVGLVVAPTFWDLDWRESENPGPSYLFWHTIYSIEEEKSIAQTLVDQARKRYGLTISTEIAEGLAANLTFNSDYGSISVRSIRKMMPFLEEGMTEYDAALAAGYERKEVQAQYDKLPRIEPNALRNPVVEQILNQMVSVVNDLMERTGIKPDEIRVEMARELKMNAKRRAAAIQANQKGLKEAQEARKAIEGAGNSRASTRDVLRYKLWKETGMVCLYSGKTIPFSDLFNGMTEIEHVIPRSRLFNNTRSNLILAYRKENEEKGQQTAIDFMEGKGPAAVQQYIDSVSRLFEQKLISKAKKDFLMMRGTDIPNDFVDHQLRNTQYIARAAVNHLAGLVGEKNVMTSTGQITDYLRERWELIDVLKEINLPYYEAANLVTREQKQKNDGTVQEVNWLESFTKRSDHRHHALDALITAFTSRALVHRLNNLNQYVDGQAELKHRNIIAPPPIPHFRALVKDHLQGILVSFKKPKSKAISPKMILKYPGQRKKSNEKIKGLVPRGSLHEETVLGKIKVYEKVPLNVRFYRFEDVVDKDLKDYLLNLKAQAESAQKKAFKAPVEWRGKTLSEVVCWKWMFTKRTAVQTLTAKQIKDKIVDAAIGKLILERFKSVQEDEKKFQKSILEHPLIFNGKTVQRITVFDEGSLMPVRQGFAYSKNNHHAIIYKDEQGNLRDEVLSLSEVVERSTRAFLETGIIPKPIQPKPAQGEEVVMTLQINDLVVIGLEKEKLESILKSGQHSLLAMHLFRVQKMSKGYYVFRQCYQTDIQLTAQFAFRRIQKPLKQFSSVTRVRLSPAGYFMETLP

SEQ ID NO: 23898 - protein, 1429 aa, unidentified
  REGION 1..1429: note = Cas Enzyme sequence
LYLGAKLRIKTEQTKYSAIKMNKKVIGIDLGTGSIGLSLRNPELSDNIQDQLEWFSVTTFNSGTGTSQRGEYTLASDRRAHVQSRRLKEHSRWKRWSTLSLLVEYDMCPMNRESLERWQTYDKSKGLKREFPIDDTAFIQWLRMDFNGDGVSDCTAFQLRRQLVEEQLDFTLPINRYKFGRAIYHIALHRGFKSSKGETLSGKDEDSEKDAMVVDADNLENVMKKSEEKKTKDLSDYMVAHNFKTVGQAFASLEEEGVRVRNSRYQAIRSQNLNEINEYFHFQKGLADYEDLHRRLISTKKGEGTLFYKLPLRSQKGHIGKCTFEKNKRRCPISHPEYEKYRAWAFINNIKYKENSEGCWLELPLALKQELYREVFTSKVRKDFAFETIRKYLEKRLGLTFMSTDGKKTINYKDKVLVAGCPVTARLQNIASLFDATIDTLILQGVKTRPSKIDGDKHQVTYDALDLWHFCFEADDIEDVKHFASQSLMFDDKAIDSFCKLWASIEQGYTTLSLKALRNINRFLEFGIKTADAIFLAKVPDIVGEVDTDNLIRFFNEQIKAPVESTMRIAKVANTLIANYKSLSLNDRFADHDFEYQLQKDDKEDVIRCIQNTDSSFELMDADEQQTIIKEVTRLYQAFFADINREYVKVPKFADVLVSKLKKLYPDVKEEHWQKLYHPSMVSDFPRDKDNANLLGSPKIGAIRNPTVLRALNVLRSNINKLLAEGLDPQETRIVVETTRVNNDINKRRAIERYNEERNAENREIEKILNEFYGSVIEENIDAARYVLEQSGEDLLTADDPDNRHYRHQIKRYKLWLEQGCQCLYTGRIINLTNLLADNLFDLEHTVPRSLSFDSSDKNLTICDAYYNRHIKQNRIPTELPNYEVDVTIGGHLYTAIKPRLKMWQDKVERMSQNVLFWRNKAKKAQTEQSHNDCMREMLLWQMEYDYWRQKLDRFTMKPKDLTDGFRNSQLVDTGIITRYAVLYLKTLFAQVDVQNGQSTSAFRKIFGIPQKDRSSNFHHAVDATILTMIPSSAKRDRMLKLFYQIDEQRKGGHEVSGLEFQLCREIASCGLGAGLADIENFISQRVMVDFYKQDRVLQKDRRPVMRKGKPLKRKTNDGKMELVTFSSDSIRGELHNQTFYGAIRRRNDDKEFYVVREPLKYKSSDKDKGFKDWKELNKRIVDLNHPADSEEFKPMVQMMMRQFPEGTSFKEACEQGIYMLGRDGRKVNRIRHIRCYGKNVANPVKVKRHTYPSDKEYKQHVLAALGDGSVYALCEYSDGLTTEYKRYTYMEISENRKSGLEDIPAIYPNKKGQPLQLARKIMKGDMLLIYEKTPDELLYLDKLELSKRLYKVQFFEGEKGITLFHHLLSDSKTKEKGNGGEKKRNKGESIKDYKKLPPIIRCSINGFLYLQKGVDFEFTKDGIILKHI

SEQ ID NO: 23899 - protein, 1372 aa, unidentified
  REGION 1..1372: note = Cas Enzyme sequence
MKRILGLDLGTSSVGWAVVDQAENDNEKSQIIKMGVRIVPLDTQEKDDFEKGKSITTTAVRNQKHGMRINLQRYKQRRAHLVSLLRREHFITDDTLLYEDGNNSTFETYRLRARAASEEISLEQLARVLLMINKKRGYKSNRKADKQEDGQLIDGMAVARKLYDEHMTPGQFVNETLLQGKRYVPTFYQSDLRAEFNTIWNFQSQFYPDVLDDELKDKVIGKNKKSTAQTFYAAKNVSAAENKDRKTRLQVAYRWRAEAVTQQLPIAQVVAVLSDINGDINNSSGYLGKISDHSKELYFNKLTVGQYLMQQLDKDPHFRIKNRVFYRQDYLNEFNTIWETQCRFHPELTDELKEEMRDTIIFYQRRLKSKKGLISYCEFEGKEITVTVNGKTKKVMTGPRVCPKSSPLFQEFKIWQELNHMFKNVPLSGDQRMILYKELSVNKELSKSSVLKLLGLKDKEHALNFKSLQGNNTQVQLMNAYKQILDWSGHDVEKFDKLDYDTKMSFIKSVFGAIGAKTDFLEFDPNNLDNYLEQPAYRLWHLLYSYESDNSETGDDKLKKHLKELTGLSDEYVTALASVQFEQDYGSLSAKAIKHILPHLLSGKVYSEACEAAGYRHSAQSLTREELENRPLEAALEVLPKNSLRNPVVEKILNQMIHVVNAAMEEYGVERDGVKRFDEIHLEMARTLKQTKDQRENASRIIEERTRENDRFVKELQEQFGIAHPSRNDIIRYRLYLELKDNGFHTLYSNTYIPREELFSKRFEVEHIIPQAKLFDDSQSNKTLETHEANLEKGNKTAMDYVLEKYGEVGAEQYRQRIAFLYDRNNKNHTNKKYKNLLTTEADIPKDFLNRDLGNTQYIASKARDILMQVTRTVVPTIGAITARLREDWKLIDMMKELNWSKYKALGQTEEYRNRDGHQVRIIKNWTKRNDHRHHAMDALTVAFTRWEHVQYLNNMNAQEGDAHNSNAWMLRSKIIKDGKFLPPMPLDQFRADAFEHMKGILVSIKAKNKVATPSVNRISGSDVRQVTQTPRTQLHKEKFYGARQRYVTTIKKVDGKFDAETISKVARKDYREALMRRLDECGGNAKKAFTGKNSLSKMPIYCDALHTKQVPESVKLSWLETYFVIREAVGPSITIDNVLDRRVRDILQERLGAYGGDANKAFSNLDENPIWLNQEKGISIKRVTIKARLSEPVPLHHKLNRDGSRLEDSEGNTKPVDFVNTSNNHHIAIYEDADGNWHERIVPYFEAIARINNEMPVVDRHYNESEGWKFKFTMKQNEYFVFPDNKTKFLPNEIDLMDKDNYSTIAPHLFRVQKLSTKNYVFRHQFESSVTAGDSLPQGIAFISIRTENNLKGIVKVRINHVGEIVHVGEY

SEQ ID NO: 23900 - protein, 1429 aa, unidentified
  REGION 1..1429: note = Cas Enzyme sequence
MKNILGLDLGTTSIGFAHVIESDDPLKSIIKQLGVRVNPLTTDEQTNFEKGKPITINADRTLKRGARRNLDRYQDRRANLIHALFKANIITKETKLAEDGKSTTHSTWRLRAQSVTEKIEKDDLARVLLAINKKRGYKSSRKAKNEDEGQAIDGMEMAKKLYEEKLTPGQFAYALLQAGKKNISDFYRSDLKEELGKVWAFQKNYYPEIFTDEFKKELEGKGQRATSAIFWVKYRFNTAENKGTREGKKVQAYKWRSEAISQQLEKEEVAYVITEINNNLNNSSGYLGAISDRSKELYFNKETVGQYLFKQLLKNPHTQLKNRVFYRQDYLDEFELIWSEQKKHHSELTDELKVEIRDIVIFYQRKLKSQKGLVSFCEFERKEIEIETGKKKIIGLKVAPKSSPLFQEFKIWQVLHNVLIKKKESKKRMEKKENQSSLVESEKEIFAFSLEERKHLFEELNLKGNLPSKTVFELLGHKIQDWEINYSVLEGNRTNKALYEAYLKILDIEGYDVKELLEVRSNKDEVELDDIQIAASEIKNMIKQIFEILKIDTAILDFDPELDGKEFEQQASYQFWHLLYSYEGDESASGNEKLYELLEKKFGFKREHSQVLADVTLSDDYGNLSSKAIRKIYPYIKENNYSTACELAEYSHSASSLTKEEIANRPLKDKLEILKKNSLRNPVVEKILNQLVNVVNALIEKNSKRDESGNIVEYFKFDEIRIELARDLKKNAKERAEMTSSINTAKTNHEKIFKLLQNEFGVKNPSRNDIIRYRLYEELKNNGYKDLYTNSYISREILFSKQIDIDHIIPQAKLFDDSFSNKTVVFRKDNLEKGSKTAYDYISAKHGAIQLADFETRIASLFEIGKKNKEEGISKAKYQKLQKKESQIGDGFIQRDLRDTQYIAKKAKNMLFEIARSVISTTGSVTNRLREDWDLINVMQELNFDKFKKLGLTEMVEKKDGTLKERIKDWNKRNDHRHHAMDALTVAFTRHNHIQYLNNLNARKQESNKLHRNIIGIETKETHVAIDDTGNKKRVFNLPIPNFREQAKAHLENVLVSHKAKNKVVTKNKNRTKLKTGEKIKVELTPRGQLHKETVYGKYRYYTSKVEKVGIKFDLPIIGRVANPRYKQALLNRLSESGNDPLKAFSGKNSPSKKPIYLNDEKTAILPEKVKLVWLEEDYSIRKDVTPENFKDEKSIEKVIDIGTKRILLGRLAEFGGDSKKAFSELDKKPIWLNKDKGISIKRVAISGVKNAEALHYKKDHLGNEILDKRGNQIPVDFVSTGNNHHVAIYINDKGEIQENVVALFEALERVNQGLPIIDKTYNQYLGWVFLFTMKQNEYFVFANTSTGFNPKEVDLLDSKNMLAISPNLFRVQKFTKKDYFFRHHFETTVEDNSNLKGTTWKREGLSGINGIVKVRLNHLGEIVKVGEY

SEQ ID NO: 23901 - protein, 1486 aa, unidentified
  REGION 1..1486: note = Cas Enzyme sequence
MKKILGLDLGTNSIGWAQINLDFKSKKGEILGIGSRIIPMDAAEMGKFDAGQSISQTANRTGFRGTRRLYQRDNLRRERLHRVLNILNLLPEHYSESIDFEKKLGQFKPNTEVKLPYRENDDNNFTFIFQSPFLEMIEAFKANGHTEKIPYDWTIYYLRKKALTQKIEKEELAWILLNFNQKRGYYQLRGEEEVDKNKKFEQLQVKDVIDSGQKVKGNILYDITFENGWEYDNQITKKEDWIGKTREFIVTTTIRKDGTIKRSYKKVNSEEDWLAIKEKTQNEVDAYNDKNQTFGIGCYIFDALLKKPTQKIRGKLVKTIERKYYKEELEKILRTQVNFHPDVFNDKALKKCIEELYPRNEAHQKMLLTKDFKYLFVNDIIFYQRPLKSKKSSIADCTYENRFYKKEDEIIKQPLKCIPKSNPLFQEFRLWQFIHNLKIYQKDGDVNGKVTIDIDVTSKFLTNDEDYSFLFTKLNNTKEINQKQFLAIFKLKETTHRWNYPENKKYPCNDTCSQISSRLSKIDGVDVDLFLTTERLQNLWHLIYSVTDKKDYEKALKTFAQKNDLPEDDFVENFKRFPPFESAYGAYSEKAIKKLLPLMRMGKYWDSSKISNDVKNRIESIVSRLNEIDYKIEKLDTISDDAVPKRLLKSFAKAKNRENPLKGLNTYQACYAVYNRHSEIGEIVQWKQPEDISNYLKKFKQHSLRNPVVEKIILETLRVVKDIWTTYSEKEFVNGQEKYKPFFDEIHVELGREMKNDKKTRERISKSNTERENTNERIKAILEELKNDPNIADDVRPYSPSHQEILKIYEDGLFSSLNEVADSIEKIRKNNKPTKAEIIKYKLWLEQGYISPYTGKIIPLTKLFSTDYQIEHIIPQSRYFDNSMNNKIICESAVNEEKDNKTAYEFLKDFGGSLIDLGHGKSVQLLSIENYEDHCQIYFRKNKSKLERLLSEDIPEGFISRQLNDSRYISKVVKGLLSNIVREDGELEATSKNLVPVTGAITSKLKNDWGLNNKWNEIIAPRFIRLNELTQSKDFGYWDEKINAFRIQVPKELERNFNKKRIDHRHHALDALVIACTTKDHINYITSLNTARNNHSLVGKIRATVKIVDKKGKERTVAKEYLKPWDGFTAAAKTSLERTMVSFKKNNRVINKTNNKTWQWVNEKGHLKKKLVKQEKGQNWAIRKPLHKATFYGKIEGFKTPRGKITTATRKPLSEITNERQLNTITDSGIVKILKNHLKSYIDENEKENYEMAFNQDGVEVLNNNIQKLNDGKKHQPIKKIRMFTHNTMFPVGDEGAKSTKYVIPEAGTNLFFNVYWDEKKQKRNFETVPLHKVIEFQKQNASLAKKDRTEAPIDNMLGNYLFTLSPDDLVYLPSEDELENNAAHQFIVLNNEQISNIYKFVDSSGITGNFVPFTASTVIANFKGKEIRSSFCKRNNLSEKDLIKNEFGLGSPQLKNQNSLTGKQVKSICWKLEVDRLGNITKIVK

SEQ ID NO: 23902 - protein, 1430 aa, unidentified
  REGION 1..1430: note = Cas Enzyme sequence
MTKLGIDLGSSSLGWTLRDGNEFKKKGVITFNSGMVKGQGGYTSPTRDRREARSKRRLIQARKYRKWELLKVLIGEYVPLSIIELEKWSKYQKGQTRKFPENENFKKWLSCDFTYLKNGNKYQNPYDLRVKSLDFNLTKHELGRVLYHLVQRRGYKDIGETDKETQNQIDRRDESGLKDALERNRTLGEALKKGFLEKGKRARNEYPFRNEYEEELFEILKSQNFNISKDENGTLTDDFVNNVRKSIIWQRPLRSQKGTIGKCTLEPNVLRSPISHPIFEIYRAWSFINTIKYFDENGVKKSLDKGVRNKLFDNLFLKKDRFKFEDVKKFLDKDFGKKQKYNYPIDSRTGKYETSFSGMPVCKEMIKIFGDKIKGYILNLDENTENDAPNFIKNYSVYDIWHAVFHFDEEYLEKLAKTNFKIGNVEVTRNKKKIEISPLVLLKKSLMLGYADLSLKVMRKIIPFLREGFIYNKAVLLAKLPELLDDKWDDNKDLIINVINDSNEKYNFQKTIVSIANKLIEKHKALEYPNNFAYKDFDYILDSSDENDICGACEGYFGEKTWESIANRNIYIQEVGLLYQEYFSDSKRAYRETQTLKDLVEKEFKELGLYLNGELYHHSMRKNIYGNPIKYNKSGVMIDVLPEPRIDSIRNPMFNKSMSILRKLINELIVSGDIDNDTEIIIEIARELNDNNKRAAIERFQNQRKSKREKYRAFLNEFKERENSSINVDQSISTFELWSEQIFDDKEGKNIKELRTDSILNEKDALKRYELWTEQKGQCIYTGKMISISQLFSNEIDIEHTVPRSILPDNTMANQTVCYAKYNRDVKKNKIPYDCENFSISTPNGSSIELRLDVWKQIRDNYKELFEKRRKPFGGEDENKKNKRIQEKHFYRMHFDYWRDKINRFEAKEIKDSWARRQLVDTQMVSKYAREFLKTYFKKVSVQKGQVTAEFRKMFGFQEEDEIKSRNKHTHHAIDAAVLTLIPVNSSKREEILKKHFEAKESGKKVSQMRPFKDFNSQNLIKNIENNILIVNYQKDKIIQQTKKVVRNRGEIEYLKNKKGDFILNEDGGKVKKTSQGDSIRSTLFKQTYIGKIKAIERDENGKPVRENGNWKYKTGDDEFIYTERKPIKEVLKKTIDIVDPDIRKLVEKQKGNDDIFDFQGNKMRHVRIKVRAGKKVKERINYRSKHEHKNHFYSASGSIPYAVMLHKNEEDTVERKMIPISSYQIAEVFRKTRKFDEVEFVKEYYPEYESYDKKLLKIGQKVFVLQDDEEYNQRIEKEFQRNRFYKITQFKYDGSKIMLQYHLEAQSKSDIDKSIKADKNDILMKYEKSLNIPLITLDKSIIDNNDRNKDYEKRLFDFNKRLKTLENKAGKDLMSKAKKEIEIFKTESSSILAEELTPPILGLSLKNWNFLYEDYDFSINLKGEIKWIE

SEQ ID NO: 23903 - protein, 1529 aa, unidentified
  REGION 1..1529: note = Cas Enzyme sequence
MKKILGLDLGTNSIGWALIEKDEEYNNGRIINIGSRIIPMGAEVSNFEQGNPQTKNAERRSARSIRRMGKRYKARRNKLLYVLSKTSMLPDQFKFSIPFDNPLKIQKVNLLPIKKGVSQLTALELLQLKVKALNEPIELKELGKLIFNYNQLRGYAGGGNDDEDVTEEATSENEEADFLKYEKIIAIVKVINDPIKQQAKKKGKEVFDIEIEYDGEVLKGETVLNNLKKNEDVELQIIIRRDKKGNVSSINFTLPIKTNWRKSMEELEEELNKLTEQKGSESYLCEYFLGKLLADKNYKLRNKVILRKRYQAEFDAIWESQLKFNPQFRSLVEDKEILSSIVGFIFPGNNTEKKQADYRNSAVEKGLKYLLRDQIIYYQRDLKDQSDLIGLCRFEKPETPIDKSHPNYLQLIKPFQVVAKSHPIFQEFKVWEQINKLSINTKTQKGFTKKGEPKYEYNDVPLPANCKQWLFDELQKKKEVSGKGFYTKLEKEGVIIKNESFLNGIHRDAKFKGNETYLFLKAQLKEWFDKLELNDTNALISFWDILYNAKGNEYDLDSERCKTIKNFIIDKCGLVTDIDKLTIRFAKIKFARNYSSLSLKAIEKMLPLMRAGKYFNEDLPININDNLLKILNENQEDPFLKALQGELEAYQDVLLKTGGMKPSYAAILVYGKHTAESYSGENIQTPTDIKPIPQGELRNPLAEQLINEAIKMVAEIWAANGEKPDEVRIELARELKNNADERNKIYKANDTNRKVNERVKQRLRELNKETSLGNIERYKLWSSQANEPFPLPEKANEPTKEEIEKMRLWEDQKCLSPYTMQPIPLSKLFDKGLYDIDHIIPKSRYFDDSMSNKVVCERSVNEDKGNRTSWEYFEVGSTAITNLLSKDQFTNYVNQNFFGKKRKNLLATKIPQDPVARQLKYTQYIATRVREEISKIVGSDNVKTTTGGVTDYLRNHWGVNEKFKEIVLDRYKNAQPFFAEIEFKKYEKEYDAKKKEYEKNHIAFDEPFIEKSIFISEFNKEYIKKEDNKLKIKGWTKRLDHRHHAMDALIVACTEQAHIQRLNNLNKELQNQLAKNKDLVKKGFEGTDEELLAEFVNLAAKEREIILEGMESNRSFSHPWKNFSVDAKEALETIIVSHKPKEKLLVQKVEKGEDAGKKDTLRIRGKLHDATLYGLSEGKESYRIKLAKLAGKQFATEKTIEKIIDPLIKESIKKHLEIYKGNKAEAFSAEGINELNKNRAVPIYGFKIYYKDQSEKYGLKKIGNKKSTQDSFNDILNRMIDEDLKNKLISHIDTKGGDFKEAFSETGIKELNQKLEEDFKQKNSTKSFKTINSIKLTPLKSDGEDEEIDLSLLPLERKSSYNNKLMVATGSNYAFVVLEKEGKRHYDEISFFDASNLVNKAFKNGFKNVQQIISRHFEQKHKGSKILFLLKQNEIVYLVQKDENIITDNKHPDFEAFWNDKKSRSKNVYKVVKFSGKEIYFLKHDIANTLVNKVEFGSQNCYRNVNNVSIKEHCIKLKVDRLGNIKPLL

SEQ ID NO: 23904 - protein, 1172 aa, unidentified
  REGION 1..1172: note = Cas Enzyme sequence
VQLKKDEAAYVITEINNNLNSSSGYLGAISDRSKELYFNHQTVGQYLYAQLQQNPHTPTKNQVFYRQDYLDEFEAIWNEQAKHHSELTDELKTEIRDIIIFYQRKLKSQKGLISFCEFESTDIEIEKNGQVLKKKIGLKVAPKSSPLFQEFKIWQVLNNVLIRKKGSKKRVVKETNQTSSFNNEKEIFVFDLDAKQTLFDELNIKGNLSANKIIELLGYKPTEWEINYSHLEGNRTNKALYDAYLKILELEGYNEDLLKLQGKDNIDVSELKSPVSEIKEMVKQIFKILSINTEILEFNAELEGKSFENQASYQLWHLLYSYEGDNSPSGNETLYRLLAEKFGFKKEHAQILANVALSDDYGNLSSKAMRKIYPYIKEQTYDKATAMAGYNHSAASLTKEEIETRPLKNKLELLKKNSLRNPVVEKILNQMVNVVNTLIETENRKLKAQGLPENFHFDEIRIELARELKKNAKERAEMTTNINASKIAHEKIFRLLHTEFGIKNPTRNDIIRFRLYEELKNNGYKDLYTNKYIPRELLFSKQVDVEHIIPQAKMFDDSFSNKTIIYKDENIKKGKKGNKTGYDYIESEYGEKALEEYKARIEVLYQSWLKNKEEGISKAKYQKLLKQETEIGDGFIERDLRDSQYIAKKARNMLYEICRVVTPTTGSVTARLREDWGLINIMQELNFNKFKTLGLTEMVEKKDGTFKERIVDWSKRNDHRHHAMDALTIAFTKQSYIQYLNYLNARRDEKHKLHDNIIGIETKETEIRIDDEGNKKRVFRLPITNFRIQAKEHLENVLVSYKAKNKVVTKNKNKTQSKNGEKVKVALTPRGQLHKETVYGKYQYYVNKNEKIGTRFDKETIDKVSNQLYKRLLLKRLSENGNDPKKAFAGKNVLSKNPIYLNNEKTEILPEIVKLTWLKNDFSIRKDVTPDNFKDKKTIEKVLDEGIKRILLNRLEKYGNDSQKAFSDLNKNPIWLNEAKGISIKRVTISGINNAEPLHYKKDHLGNYILDEKGKKIPVDFVSTGNNHHVAIYKDENGNLQERVVSLFDAIQLVNAGLPVIDKEFNAGIGWEFQFTMKQNEYFVFPNEKTGFNPKDIDLLDWNNYKLISPNLFRVQKLATKDYFFRHHLETNVEDKPELKGITWKREGLSKLLNIIKVRINHIGEIVKVGEY

SEQ ID NO: 23905 - protein, 1041 aa, unidentified
  REGION 1..1041: note = Cas Enzyme sequence
LFRTIFRKFDYEREGEKLLQNADVFYKLWHIVYSISSSDLEKSAKGIRTALKQFNFPEPVVEAFTKLEEFKKEYAAYSSKALKKLLTVMRCGKYWKWETIERTEIKTPDSPIDNPTRIKLSDRIDKIISEGWERDIKVDKRTGEIINERHFDRREQFSGLPVWMACYVVYGKHSERQNTRKLSMEEITKIDIMTLVPHNSLRNPIVEQVVRETLCLVKDICKQFGQPDEIHIELARELKKNMEERKAISENNARNLEEKLRAKFLLQELLNGDFEHYDEAGKKIKRSFTVKPNPLNPVDIEKFRVYKSLASFEFDKKEKKNEDQIRLDKLFRDGKKERVPTNAEIRKYILWLSQKCISPYTGKIIPLSKLFDETQYEVEHIIPRSRMKNDAMDNLVISETGVNKAKGNELAANFIIQSRGKCTYGGVQYTLFTYEEYCNHCRRTFRGKKYKNLMATEVPQDFIERQINDTRFIGKKLAELLYPFAKEKDGLVYTIGSITTELKGRWGLNSVWKQLLKERFERLEKITGEKYIFPNEDDQKDIVFNVPAIPDLDIKRLDHRHHALDALIIAATTREHIRYLNSLNAADTNEELKQYRYTLCKGKIREFRLPWETFTRDAKEKLSEIVVSFKSNNRVISKPFNRYQKWIKKEDGTYQKQFIVQAPNERWLAVRKSLFKEPQGIIWVKKKRYVSVKEAFRIQIERMQVEHDHEKRKTAAYVYDQYARPLIKEIIQKTVESTGIELSRTNDLLSAIEEDYLKKNEKKNTSGKGKEYSLGSKKYNKIEIAEFVMYKAKRVPLDGSFDHKKIDKIPYSESSRIPILLHKHLQEYEKKNLGSAEAFSSEGLEKLAKKNNGMPITTVTIMDGELKDKHLDNLFGNKYMEPDAGSIAYFIIYENEKTKDRTEMFSLPTHNVLERIRNGMPIAEKREGYRTIILSPNDLVYVPTEAEWERIKAGETNVIDWNNKKIIAKRIYRMVSADDAFFVQHHIARPIIPTVLKGDNKTKGEIDWHNKSTKTMDGRTTIADCCIKINVDRLGNIKPAI

SEQ ID NO: 23906 - protein, 1371 aa, unidentified
  REGION 1..1371: note = Cas Enzyme sequence
MKTILGLDLGTTSIGWALVKEGEKSQIIKTGVRVIPLSTDEISNFDKGKSITTNADRTLKRSMRRNLQRYKLRRENLVETLLEHGIISKESKLNESSNHSTFETYALRAKAAKERIELPEFARVLLMLNKKRGYKSSRKAKNDEDGVAIDGMTIAKELYDNGITPGQYSLNLLENGKKALPDFYRSDLQNEFNQIWQFQGKFYPEDLTDQRKEHLYGKTKNQTKSIFEKEWKIDAVELDGKMAEKKLKSYQLRAKSVKEQISLAELVEVFADINGNISNSSGYLGAISDRSKELFFTKKTIGEYLYDQIISSPHTRLKGQVFYRQDYLDEFNSIWETQAKFHNCLDEELKIEIRDIVIFYQRRLKSQKGLLSTCELEGKWRTVKVDGKEKQKLTGPKVVPKSSPIYQEFRTWTQLCNLEIFDLSGKNKIRRLDLDELNILQNELQYKEKITENDINKILGLKNKYNFEKIDGNRTGYALIKAFQEICTVSGHDSIEWGKLKSEQVIDNLKSIFKLLGIHLNLLDFSMTSGSIEDSLYFKLWHLLYSYEGDSSKNGIESLIEKLERDFGLTKEYATILSNVSFESDYGSLSTKAIKKLLPHLREGNTYDIACALEGYNHSNSHTKEENEKRQLKDKLDILPKNGLRNPVVEKIINQMINVVNTIIDTYGKPDEVRVEMARELKKSAAQREKLTQAISKATREHEEIVKILRNEFGITNVTRKDIIRYKLYDELKDNGYRTLYSNTYISREMLFSAEIDIEHIIPQSKLFDDSFSNKTLEFRQINIKKGNSTAWDFVANEYGQEALLQYEERVTKLFNKEGKRSKYKKLTWEEKNIPDDFINRDLQDTQYIAKKAKELLEDVFRTVSTTTGSITDRLRNDWQLVDVMKELNLPKYEAIGMVDTVGTKNGHPKKEIRDWTKRNDHRHHAMDAITVAFTKPSFIQYLNNMNAKSDKDGVIYGILKKETYFDQDNKRRFKPPMKLDDFRASVKEHLENTLVSFKAKNKVTTRNKNKIQSKGTKITHISETPRGQLHKETVYGASDVFRSKMEKVGASFDAQKIATVAKPVYRNALLKRLEAYGNDPKKAFTGKNTLEKNPIYLNDLHTMQVPESVKIVWTEKQFTIRKPISPDLKLDKVVDAGARRCLQERLDLYGGDAKKAFTNLEENPIYLNKDKGIVLKSVTITGVSNAVALHSKKDHFGKNILNKDRQPIPTDFVSTGNNHHVAIYRDENGNLQEEVVSFMEAVSRKNLGLPIIQKNHPEDWEFLFTMKQNEYFVFPNEKTGFDPNAIDLMDPKNYKLISPNLFRVQTLSIVKYGNNVIREFKFRHHLETILNDRKELQNLVYKQIKSLNPLTEIIKVRINHIGQIVQTGEY

SEQ ID NO: 23907 - protein, 930 aa, unidentified
  REGION 1..930: note = Cas Enzyme sequence
FEELNWKEKLSSTEVIKLLGINGYELNFKEIEGNRTHAAFIKVLNDFFVNEGHDELNLLKMNAKELINTLKQLFPIYNINQELLNFDTNVDGQELEKQVFYELWHLLYSYEGDNSQSGINSLREKLADSKFGFPKESNSVITNISLSQDYSSLSARAIRKILPFLKEGNRYDLACLLAGYNHSHSETKDDLSKKVLLDKLDILPKNELRNPVVEKILNQMINVVNTIFETYGKPDEIRIEMARELKKSAKERENATKAIRQATDEHLKLKRELQAEFGLTNVSRNDLIRYKLYLELKENGFKTLYSNQPIDRSKLFSSEYDIEHIIPQSKLFDDSFSNKTLELRSVNLKKGNDTAYDFIVKEFGEEGLKQYEAKVKALFGNQQGKKSKYRKLLMSETEIPKDFIERELRDTQYIAKKAKDILATVVLHVSTTTGSITEKLRDDWQIVDILKELNWNKYHKLGMTETIENRHGQKVNHILDWTKRNDHRHHAMDAITVAFTKREYVKYFNNLNAKSEKDGEIYKILKTETYFDKDQKRRFNPPMPLTQFRIRAKEHLENTLISFKAKNKVSTKNKNSIKTAKGKKTIIQDTPRGQLHLETVYGSSQYYSSKVEKIGANFDLNKIKKVSNSKYRKLLQKRLEEHGNDPKKAFTGANSLSKNPIYLNALETYTLPESVKVVEFETRYTIRKPITPDLKIDKVIDKGIQLILQERLNQHHGDAKKAFSNLEEDPIYLNKEKGQVLKRVTIQGINNAVALHSKKDHFGKELVDVNGNAIPVDFVNTGNNHHVAIYRDENDNLHEEVVSLFEAVTRQNQGLPIIKKHHELGWEFLFTIKQNEYFVFPNEETGFDPSELDLLDSRNYAKISPNLFRVQKFGSLLSGFWFRHHLETTIDIKSELKGQTYKVIQTTKNLKSILKVRLNHVGSIIQIGEY

SEQ ID NO: 23908 - protein, 1053 aa, unidentified
  REGION 1..1053: note = Cas Enzyme sequence
WAVINQEKERIEDLGVRIFDKAENPKDGKSLATPRRDARSTRRTLRRKKHRMQRIKILLVKQGLLSKTELNHLYESATEVDVWNLRLDAIERKLNPKEFTRVLIHLAKRRGFKSNRKETTLSENGQILESISENQQIMEQKNYKTVGEMILKDKKFENHKRNKDGTYIGTVTRQQLQDEIQMIFNAQRLYKNNYATEEFESSYLEIWASQRPYASKDQIEKMIGHCTLDPKEKRVPKASWSFQYFVALQTINNLRLISKDRIEELSFEEKKQIMNLALEKPIVKYIDIRKLLSIPNEFQFNSLLYSADTVDTTVENRKCIELKEYNSINKVYKQIYGKNDLNLLPIDYDTIAYGLTIFKDDKDILEYLKNKYVNAKGKPINNLAKKTYDDTFIQALLTLNFSKMGHLSFKALKNIIPFLEEGLSYDKACEKAGYNFKGTSYTEQTKYLPVIPQNTNPVVHRALSQTRKVINAIIKKYGSPNAIHIETARELSKTFQERKEIDSMYQDNSKKNEHAIHKLKELGNINPSGINIVKFKLWNEQDGRCTYSGKYIEPHRLFEEGYTEVDHILPYSRSLDDSYNNKTLTLGTENQRKGNKTPYEYMGNTSIWNDFETRVQSNKKINKKKQQKLLLQHFSYAREQEFIERNLNDTRYATIYLSSLIQQHLIFSESSSKKKVHTVSGIITSHLRSRWGFNKDRKEGHIHHALDAVIVAVTSDHMIQRVTKYYKLKELNRSLQAKRMPFPEPWEGFRLELEARISPNTQQYLKGIHFKNYADVNLSEIKPIFVSRMPKRSITGELHQETIRKFIGYNEKGKVLTAIKTKLEDIPFDANGDFPMYGKETDLYTYNAIKERYLSHKKDKRKSFQEPLYKPTKSGGIGPLIKSIKIMDTRTIVNPVNQGKGVVYNSKIARTDVFKKGEKYYLIPIYTIDLMKNILPQKAITAGKGYEDWTTIDSSFTFLFSLFPNDLIQIVPSKNKTIKARTTVSKKEVLLPSLTGYFKGVHSGTAGITVETHDGSVIANVGSKQLLLIEKYQVDVLGHYTKIKEERRIGMAI

SEQ ID NO: 23909 - protein, 1394 aa, unidentified
  REGION 1..1394: note = Cas Enzyme sequence
MNKTILGLDLGTNSIGWALVNEDDKANEKSSIIKLGVRVIHYGENMVKTDSGAASMKPEEDFCSGKGISPNAGRTNKRSARRNLQRFKLRRKELISILNKNKIISDDNLLIEDGKNTTYETLKLRAKSAVEKIELNEFARVLLMINKKRGYKSSRKAKSTDEGSLIDGMAIAKKLYDENLTVGQFVYQLLSSGKKYIPTFYNSDLINEFNHIWEFQTQFYIDLFTKELFEKLKGKNSGQTWKTLQENWNLVGIQQKGNATEKKIEKYKWRTEALKEKFDLETIAIVLQEINKEISSSSGYLGNISDRSKELYFNKQTVGQYLYNSICKNKHHSLKNKVFYRQDYLDEFEQIWETQAKYHSILSNQLKEELRDIIIFYQRKLKSQKGLISLCEFEHKEIIVKNNGNEKKKIIGSKVIPKSSPIFQEFKIWQILNNVVIKHKTEKTKHVLSEEDKETIFKELNIRGNLSQSEVLKLININSKDWETNYKKGFEGNNINQSFYNVFQIIAENEGYGFDWNKKSADEINEELKAILPTLGINPDILFFDSDKGINQPSYQLWHLLYSAQDDDKISEADKLIYGDTDVALKKNLHTKFGIPIEYTNLFCAINFSDDYGNLSYKAINKILPKLKDGYEFSKACELVGYNHSNSKTKEDISNKKIETSIQLLKKNELRNPVVEKILNQMINLVNEVIENYGNPNEIRIELARELKSSAKERENYTAYINEANIKHQEIIKILRSNPFNIKNPTRNDIIRYKLYEELATNGFKDLYTNTKINAEDLFSKKIDIEHIIPKAKLFDDSFSNKTLAFRQNNLDKKDQTAIDYISRVLPDNLEKYKDTLKMLLDKKVISKPKYNKLLMTEAEIPSDFINRDLRDTQYIAKKAKNLLYTVTKTVVSTTGSITDKLREDWDLVNVMKEINLPKYKAIGLTNIIETKDNQQKEVITDWTKRNDHRHHAMDALTVAFTTHNHIQYINNLNASNEESKPLFAIRNKITKRLIDSNGNSKRLFIPPMENFRTIAKEHIENILISFKAKNKVVTRNINKSKKNGKNNFNKFTQLTPRGQLHKETVYALSKKIVIKEEKINASFDIDKINLVCNKLYKSLLLKRLEENNNDAKKAFTGKNALSKNPIYLDDKKEKIVPEIVKLKYLEDNYTIRKDINKDLKIEKVVDEKIRKILQKRLDEFSGKADKAFADLENNPIWLNKEKNISIKKVTITGIANGLALHHKKDHKGNLILDENNKKIPNDFISTGNNHHVAIYKDADGNLQESIVSFFEAVERANQKLPIIDKTYNQDLGWQFLFTMKQNEMFVFPSEDFNPNEIDLLDEKNNKIISKNLYRVQKIATKNYFFRHHLETTVNEIKELKDKAYINLRSTSNLSTIIKVRINHLGKIIQIGEY

SEQ ID NO: 23910 - protein, 1470 aa, unidentified
  REGION 1..1470: note = Cas Enzyme sequence
MKKILGLDLGTNSIGWALVNEAENENEKSSIIMLGVRVNPLTVDEQKNFEKGKSITTNADRTMKRGKRRNLQRYKLRRENLIEILKENGFITDEPILSENGNYTTFETYRLRAKAVTEEITLEQFARVLLMINKKRGYKSNRKAKGAEEEGVLIDGMEVAKLLYEKDLTPGQYCLQLMEQGKKQLPEFYRSDLQEEFNRIWAKQQEFYSEILTDKLKENLREKSEKATWTICKEPFNIVGIPRTTKGEELKKENFAWRTKALSEKLDLESLAVVLQKINGQINNSSGYLGAISDRSKELYFNKQTVGQYQMAVLAQNPNASLKNMVFYRQDYLDEFNIIWEKQAEFHKKELTEELKKEIRDVIIFYQRRLKSQKGLIGFCEFESRQIEVEIDGKKKIKTVGSRVIPRSSPLFQEFKIWQTLNNLEVSGKGRKSKKKKEHSLSLFTNQEDPLLIYGKRELYQEEKELLATELSIKEKLTKSDILKLLFDNPQELDLNFKEVQGNLTQAKLFAAYRDIIEQTGHILDLKKSASEILENVEQIFSGLGYNTDIIRFNSDTDNLDNDPMYKLWHLLYSFEGDNSKTGNENLINKITNLYGFEKEYAAILANITFQDDYGSLSAKAIRKIFPYLKEGNKYDISCEYAGYRHSASSLTKEELENMIYKDRLEILPKNSLRNPVVEKILNQMVHVVNAIIADPQLGKPDEIRIELARELKKNAKERQELTKSIEESTRMHKQYREILSKPPFNLTYISRNDIIRYKLYEELKDNGYHTLYSNTYISPTTLFSGDFDVEHIIPQSRLFDDSFSNKTLELRSINIEKGNATACDFVKEKYGETNNENSMENYLNRIEKLYKTGVLSRAKYNKLKMQEKDIPSGFIERDIRNTQYIAKYAKTMLSDLVKVVVSTTGAITDRLREDWQLIDVMKELNWEKYKNLGLTTEFTNEEGYRIRQINDWTKRNDHRHHAMDALTVAFTKRQFIQYLNNLNARRTDKNQSISNTEEEEYDNFAITTEDMLLNTRDVLGIEKNYLYRDHRNKLRFYPPIPLNDFRAEAKYHLENTLISIKAKNKVTTQNINFTKRKRGVNKKTQQTPRGQLHLETVYGSQKQYVVKEESVNAKFDAEKIATVSKPAYREALLRRLQEFDNDPKKAFTGKNSLTKNPIWLNKLQTAQVPEKVKTISFETAYTIRKEISPDLKLDKVIDLGIRRILENRLKEFRNDAKKAFSNLDENPIRPNKEKGIAIKRVTISGISNAEALHDKRDKEGNLILDKNGKPQPVDFVNTGNNHHVAVYRKPVFDKDGNHAEDENGNKKYELEENVVSFYEAVSRRNLGLPVIDKAYKASEGWQFLFSMKQNEYFVFPRTEKVEKIDEETGEITEEEIVVFDPNDIDLLNPDNYKLISPNLFRVQKFSKLIYGNSVVREYVFRHHLETSIKNTSSVLKGITWIDFRSSKGLDKIVKVRVNHIGKIVSVGEY

SEQ ID NO: 23911 - protein, 1566 aa, unidentified
  REGION 1..1566: note = Cas Enzyme sequence
VNCFQIEFQTYEKKIKKEYTMKKILGLDLGTNSIGWALIETDINNKPNSIIGLGSRIIPMDQASISDFERGNSKSQTAERTRYRGIRRLRERQLMRRARLHRILNELQFLPEHYQECIDFEMRLGEFKSDKEPKIAWRRSSQNKMEFIFKDSFQEMLSDFSIRQPELITGGKKIPYDWTIYYLRKKALVERIGKEELAWILLNFNQKRGYYQFRGEDDTDSVRTPKTRKYFDRKVITSIVDTGQEYKGLKILIVELEDGNKGKIFKKEIPGWIGQEKNIIATVDLDKDGNDRKEDGILSQRFSIPTDTEWETEWKLIKLKTEKDLEDSLKTVGSYIYDSLVKNPNQKIRGKLVRTIERKFYREELKAILNKQREFHQELIDRKIFGQCIFDLYPKNEAYRNSIANKDLAWLILDDIIFFQRPLKSKKSLISDCSLEERKYMDKETGELKVVPLKCIAKSHPLFQEFRLWQFLSNLRIYKKGKTDFDVTSELLKTDDDYEALFNWLNNLKEIDQKSLLRYPAFGLRKEAENYRWNYVEDRIYPCNETRSMIMGRLAKTDGISAEGFNSEKLEELWHILYSVEDRFEIEKAIKKFSQKHTLGENFVETFRKFPSLKKEYGSYSAKAIRKLLPLMRMGKAWSIDNIDPKTKDRIDKIINGEYDEQIRNRVRDKAIHLTTPSDFKGLPVWLASYIVYDRHSESKEVMKWEKPEDIDLYLKKFKQHSLRNPIVEQVITETLRVVRDIWKQYAYSETVKDVYGKVSEGVSELAEIHVELGREMKNNKADREKISRINIENENTNLRIKRMLMEFVNPEFEIENVRPYSPSQLEILRIYEDGVLNSGVDIPDFVGDIIKKFRESDVRKQPSMSDVLRYKLWLEQKYRSPYTNEMIPLGKLFTTAYQIEHVIPQSRYFDDSFSNKVICESEINQLKENELGFEFIKNNAGRLVEISFGRPVRIMSVEEYEQFVRLNYSGNRLKMKKLLMDEIPNDFIERQLNDSRYISRVVKGLLSNIVREEGEEEPTSKNMITCTGGITDRLKKDWGLNDVWNTLISPRFERLNQLTGSQQFGYWDTKDGKTVFQIQMPLELQKGFSKKRIDHRHHAMDALVIACATRSHVNYLNNESAKASARETRYDLRRKLRKIETIQRERIIDGRKVLQNIEVAKEFHKPWRTFTEDAQNALSEIVVSFKNNLRVINKSSNYYSIMDSAGRRIKEKQKTRNNWAIRKPMHKDTVYGKVNLRRCRTVPLSSALSDVNLIKDLKLRNKIKELIRIGYDSKRIVKYFRENQIHWKNLNSSAVEIFYFTDNVEKQVATRKFLDESFTEKKIVNSITDTGIQKILLAHLELYGNNPETAFSQEGIEEMNRNLIALNGGKFHQPIHKVRVHEPLGNKFPVGTTGNKSLKYVRAAEGTNLYFAIYQDPEGKRTYESIPLNLVIERLKQKLPPVPDTNATGLRLLFWLSPNDLVYVPAVDEAVLFNGQAHFNKERIYRFIDSSGSTANFVPHSSANIIFSFPKDIAQKYCSGEKLIQDEFGVGSPQSKNQRAITGEMIKEVCIPIKVNRLGEIIQVF

SEQ ID NO: 23912 - protein, 1116 aa, unidentified
  REGION 1..1116: note = Cas Enzyme sequence
VYKGYVKRSIQANQGRNIMSNYRLSLDIGTNSIGWCALALETLNGRQNPDGIVDMGVRIFPDGRNPKDGSSNAVNRRMARAARRNRDRSVERRNRLIAALVTFGLMPEDGNQRRKLTELDPYELRNRGLREKLYLYELGRAIFHLNQRRGFKSNRKSDAKDKEAGAIKSALRDQQNAMLSAGARTFGEYLYLRRQDGESVRSRLKTKRIADAKGKEKNQDYYDFYPGRELLENEFDTLWQVQAEHHPSVLGKEARDKIRDIIFFQRPLKPQVVGKCTFERLEDRLPRVFPIAQRCRIYQELNHLQVLDTRTLKGTPLTLEQRDKLAALLCQPNGKKSGKSEVSFDAMRKKLHLGEESIFSLESEKRKGLEADTTSALLSHKDRFGPRWYQIPVEGQEQIVGALLYEDDEEELISQLMENWEVDRKRAEEIACTPLPVTYGRLGITATRKILAELMQTVIPYSEAVVRAGYASHSQLSSGKQWERLPYYGEVLERHVAPDPEQAGDPRATLEKRFGKVTNPTVHIALNQVRKVVNEIIKLYGPPAEIHVEVLRDLKNSLERKKEITAEQAENQAKNDECARRLRQEFGLPVNRENIQRIRLWTELKAADRVCPYTGETITEHNLFSEEIEIDHVLPWCRTLDDSMANKILCKRRANREKSNQTPFETWGNAGYWPEILARSAVLPKNKRWRFADDAMQRYMKDRDFIARQLTDSQYIARLAREYLAVLFPADEAHKVVCLPGRLTGLFRHHLGLDEILDEINPGRKDSPVPKGQKNRNDHRHHAVDALIIGLMDRAFLQRAASISARLEKEGVYKMLENFPEPWANFHATAREALGKIIVSHKRDHGIAAALHNDTAYGFAKRPDNRGNAVHRVAVKDLEVTNLLAIKGKSLRAELFAHLAGFSLETAFKNLETLDDNKRKGTQALKEAIGLDDKEIAVRIQAFFHDRGIRHVRVIEEIELVPIRNQRGLTYKGFKPDGNAYLEVFKAASGPEWESEIVTSFAANAQGNGNHMTSGDTTEAPRRKVIRLFRQDMIEIEHNGQRHIFYVQKMSKATIALAEHFEANADSRDRDKKDSFNFLRKANAELLRKAAVRFLVVTPAGRVRYLSGERDDSESG

SEQ ID NO: 23913 - protein, 960 aa, unidentified
  REGION 1..960: note = Cas Enzyme sequence
IKIGSRTGDDIKLTTEQKWAIFQHLDNNEKLTSADLLKILNLRKENCYVNKQLAKGLNGNITKQAIRQGVGGSDKYENLLKLELKIVENCLYDKVTGEIFEDIPIKFIDPSVEKEPFYQLWHTIYSIQDQEICSSVLQTKFNIEQPIADKLAAIDFSKHAFGNKSAKVIRKILPYLMEGDGYSEAMSYAGYDHSNSQTKEENLQRKLLDQLKAIPKNSLRQPIVEKILNQMVNVVNAVIEKYGKPDEIRVELARELKQSKEERNDADKAMSKRQRENDAITKRLEEFGLRATRNNIIKWRLYEEIDNQEKRLNAICVYCGQPISLIEALKGNDVDVEHIIPKSKLFDDSQSNKTLAHRHCNKNKNDLTAYDFMKGKPEAVFNEYVERVNKLYASRVIGKAKRDKLLMTESKIPDNFIDRQLRESQYIAKKAREILQTICHNVWSTSGTVTAELRHLWGWDDVTMNLQMAKYRELGLTHQVEWESEHGKNKHKKEVITDWTKRDDHRHHAVDALTIAFTKQGFIQRFNTLSAAKTREDMMFDVEQRSLEFREKRSLLEKYIIGEQPLSVEEVEKAVSNILISFKSGKKVAVWGTRKIGRRGSKEVVQKKIIVPRGALSEESVYGKIKKQEEKDYKYLFENPQLIFNPYIKAKVEERLLMFDGDVKKAIASLKKIPIYLNKEKTVVLEKATCLKDEYVIKYTVDTNFNKVDKVVDSKVREILRDRLKKFGGKEKEAFKDVQLEDKTVIKWYDDEGIERPIKSVRCFTGLSAVVPVKKDENGNDIGFVKPGNNHHIAVYTNTEENKQQHVCTFWHAVERKKYGIPVIIKSTNEVWDKIQTEPDGTYPESFLEMLPPPNLNLLVSMQQNEMFILGITTEDIMTAIEQRDYRLISDKLFRMQKMSIKPSSGQIDLVFRHHLETQLVDDENSKKSKRFYNVQSLGAFFALNPYKVRIDNLGDIITK

SEQ ID NO: 23914 - protein, 1566 aa, unidentified
  REGION 1..1566: note = Cas Enzyme sequence
MKKILGLDLGTNSIGWALVDADEKKILGMGSRIIPMTQDVLDTFSGGKPLETQTAARTSYRGIRRIRERNLLRRERLHRVLNVLGFLPEHYAQKIDFDKHYGQFVDESEPKLTYNRDFIFKNSFEEMLKDFKQSQPQLFYTKTNGKETKIPYDWTIYYLRKKALSQKITKEELAWIILNFNQKRGYYQLRGEDDADATRTAQTRIYFDTQIINSIVETGSIYKGLKVIQITLENGDIGKYFSKEVPNWVGLQKNIIATIDLDKDGNDRFEDDGTLKRRFSIPTEEDWEKKWKLIKIKTEKEIKDAGTTVGTYIYNNLLKNPSQKIRGKLVRTIERKFYKDELIAILKKQIELQPELFTDDLYNDCVRELYRNNEAQQLVLSKRDFVHLFVEDIIFYQRPLRSQKSSIGNCSLEYRIYKNKDGNQVKEYLKTIPKSHPLYQEFRVWQWLSNLKIYLKADDTDVTAEFLRNSHDVVNLFDFLMTQKEVGHKDILKHLVSPALKEKFPSAKPTGFNKEVEKEIAKYRWNYVFDDSKEEDNSKKYPCNTTGYEIRRRLEKVKNIPANFLTSEIEQHLWHIIYSVTDKKQYEKALETFAGKYKLDKNSFIEEFRKFPPFPSEYGAYSEKAIKKLLPLIRLGKYWNWDAIDTKTQNRIEKIISGECDESIKTRVREKAINLTDNTHFQGLPIWLASYVIYDRHSEADIAGKWNSAAELEQYLENFKQHSLRNPIVEQVITETLRMVRDIWKQFGQGAKDFFSEIHVELGREMKNTAEDRKWLTEQGSKNEATNLRIKALLLELKENADGKLPVENVRPYSPLQHEALRIYEDGVLNSITDLPEDIIKISKTAQPSKSELQRYKLWLEQKYRSPYTGQIIPLVRLFSEDYQIEHIIPKSRYFDDSFNNKVICESAVNQLKDKQLGLEFIKNHFGQEIELGFGKTARVLTEEEYRKFINEYYSKNKTKRQNLLLDDIPEKMIARQMNDTRYISRYISGILSNIVREEKEDDGVNSKNLIPGNGKITSVLKQDWGLNDVWNEIILPRFERMNRLTNSTAFTYWNEQHQKFLPVDYSPIDSKRIEKKRIDHRHHAMDALVIACMTRDHVNLLNNQSAKSETSRYDLQNKLRHKVKESWIDKKTNKVVERDVFKEFKKPWDNFTIEAKNELETVVISFKQNLRVINKATNNYQKWIEKDGKKVRATIKQKGMNWAIRKPLHKETVSGKVDLKRIKVPKGKILTATRKDIDTTFNLKSIESITDTGVQKILKNYLAYKNNSPELAFTPEGLEEMNANIKQFNDGKAHKPIKKVRIFELGSKFPLGESGNKKDKYVEAAKGTNLFFAVYESKDGKRSYDSIPLNIVIERLKQGSQAIPEMNDEGFTLSDFLSPLDLVYIPKQEEIEMPHLIDFRKVDKNKIERMYNVNDFSGVTVYFSKNSFAKSIYPKEMDLNWNEKKQKLSGSYDDKTASYDQKSIKEICIKINVDRLGNVSPSIPSKKSNTNSYNSNNPAEEPAAPYTSTKKITISKSPDDVENSQLNYWAKLTPEKRFERFLELMNRFYKFVKPDWSTKKIILDL

SEQ ID NO: 23915 - protein, 1545 aa, unidentified
  REGION 1..1545: note = Cas Enzyme sequence
MKKILGLDLGTNSIGWALVDVENNKIEGLGSRIIPSDIEMLSRFNSGLSLSKANAGQSFTPTGKRTDYRGIRRIRERHLLRRERLHRILNILGFLPEHYAREIDFEKHYGQFVDESEPKLTYDNRNFIFTKSFEEMLNDFKQSQPQLFYTKSNGKETKIPYDWTIYYLRKKALNQKIAKEELVWIILNFNQKRGYYQLRGEEEEENPNKSVEFHSLKIIDVIGDEIPNNKGENRYSLHLENGWVYRRSSKTPLFDWKDKVRDFIVTTDLNDDGSIKTDKDGNERRSFRAPGEDDWTLLKKKTEQEINKSDKTVGTYIYENLLQNPSQKIRGKLVRTIERKFYKDELKAILKKQIELQPELFTDDLYNACIRELYQNNIAQQLVLSKPDFIHLFVEDIIFYQRPLRSQKSSIGHCTLEYRVYKDKKGKEVKEYLKAVPKSHPLYQEFRIWQWLSNLKIYRKNDDTDVTNEFLNSTNDKVDLFDYLMTLKEVGHKDILKHVLVPKLKVKYPGAKVSAFNKEVEKEISKYRWNYVFDDLKEKEEDKSKKYPCNTTGYEIRKRLEKVENVRGDFLTAEIEQHLWQIIYSVTDKNEYKTALGRFAQKYALDKDTFVFHFEKFPPFKSEYGAYSIKAIKKFLPLMRIGKYWNLDAIDSKTQERIEKIISGEYDENIKVRVREKAINLTENNDFQGLPIWLAGYIIYDRHSEAEIAGKWNTVDELEQYLEDFKQHSLRNPIVEQVITETLRVVRDIWKQYGQGARDFFSEIHVELGREMKNTADDRKRLTDHVSNNEATNLRIKALLAELKENSDGTLPVENVRPYSTVQQEVLRIYEDGILSSNIDLPDDIIKISKTAQPSKSELQRYKLWIEQRYRSPYTGQMIPLGRLFTEDYQIEHIIPKSRYFDDSFNNKVICEAAVNQLKDKQLGWEFIKNHHGEKVECGMGKVVEILSEEAYQTFVKEHYSKNKTKRQNLLLEDIPEKMIARQMNDTRYISKFISSLLSNIVRADKEDDGINSKNLIPGNGKITTVLKKDWGMNAVWNDLVLPRFERMNQLTNTNDFTYWNEQHQKFLPVDYSPFDSKKIEKKRIDHRHHAMDALVIACMTRDHVNLLNNQSAKSETTRYDLQNKLRNKSKESWLDKKTGKQIERDVFKEFKKPWDHFTIDAKNALETVVVSFKQNLRVINKATNNYQKWVEKNGVMVKEIVKQEGTNWAIRKSLHTPMPYGKKYIFFDLLKIAESVGKYKYIIDNEIKTKVEAVLFECNGRITETQKKLKQIPITDNTGTPIIQTAFKINTEKFRRRQPISTLSNRDQGGIKTIEDAKKVIDKIVDFKIREDLLKHLKECNNDLDKAFSTEGIERFNSKRKIPLYKLPIGECGSGRFQVGYKKSTKHKWVEADKGTNLYFAIYEKENGKRAFETIPLNIVIERLKQGMKEVPKLNEKGEKLLYSLSPNDLVYVPTEDEMLNLQSLTITQHNSEQIKRIYKMVSSTGNECHFVNHHIASLIKPYDSKFKTGELGSLNKLETSFEGLRIKEVCIKLKFDRLGNISI

SEQ ID NO: 23916 - protein, 1151 aa, unidentified
  REGION 1..1151: note = Cas Enzyme sequence
AICAKTFKDKGIELIGSKRQGKAAEQKNENYTWRVKGLTEKLNLEQLVIVLQQINMQINSSSGYLGSISDRSKELYFNKETVGQSLMRQLDINPHTRLKNQVFYRQDYLDEFNTIWEVQSKFHKILTIELKTEIRDIIIFYQRRLKSQKGLISFCEFENRQIELIIDGKKKTKTIGNKVCPKSSPLFQEFKIWQILNNIEVFEKSNLIKRLLYQEEKDILFKELNLKEKLSKNDALKILFDNHKELDLNYKEIEGNRTNASMYKAFEIIIELTGHGEYDFTKLDADKIIELTSSVFKGLGYNTDILIFNTNLEGSDFEKQPAYQLWHLLYSYEGDNTNTGNDKLIQKLINNYGFEKEYASIISNISFQPDYSSLSTKAIRKILPHLKEGNEFSVACTLAGYKHSKNSLTKEEKEKKVLKSKLEILPKNSLRNPVVEKILNQMINLVNTSIDVYGKPDEIRIELARELKKSAKEREELTSVVAKSKLEHEKHRATLQNEFGLSHVSRNDIIRYKLYLELEHRGFKTLYSNTYIEPNKLFSKEFDIEHIIPQSRLSDDSFSNKTLESRSVNIEKSNETAIDFIKLKQDENGLKEYLDRIEDLYKAFKISKTKYNKLKMTGAQIPDNFIARDLRDTQYIAKKAKTILEDLVKDVISTSGMVTDRLRQDWQLIDVMQELNWDKYNKLGLTEVIETRDGHKINRIKDWTKRNDHRHHAMDALTIAFTKRSHIQYLNNLNARSDKTGSIYGIEAKELYRDEKNKLKFKPPFALNDFRSEAKKHLENILVSIKAKNKVTTININTTKKQDGLNKKMQLTPRGQLHLETIYGSIKQYVTKIEKVGANFTEELIKTVANKKYREALLKQLIEFDNDPKKAFTAKNSLEKTPLYIDALKTIKVPVKVKTVTLETIYTIRKEITHELKIEKVVDPKIREVLNARLKEYNNDSKKAFSNLDENPIWLNKLKGIAIKRVAITGINNAQALHSKKDKEGNLVLDENGITMPIDFVNTGNNHHVAIYSNENGELQEVVVSFFDATTRVNLGLPIIDKNYKEKEGWQFLFSMKQNEYFVFPNEVTGFNPKEIDLLNPENYHLISPNLFRVQKFSIKDYFFRHHLETNVENENILKGITWLRTGLKNINSIIKVRVNHIGQIVSVGEY

SEQ ID NO: 23917 - protein, 1438 aa, unidentified; identical to SEQ ID NO: 22907
  REGION 1..1438: note = Cas Enzyme sequence

SEQ ID NO: 23918 - protein, 1396 aa, unidentified
  REGION 1..1396: note = Cas Enzyme sequence
MKKILGLDLGTNSIGWALIDKENQKILGMGSRIIPMGTDKLDYEKGAGITKNADRRMARTIRKMNKRYKLRRNKLLFILNELGILSDQFQFKNGIPEPTKLQDLELLPIKKGTLQLTSLSHYQLRVKALSEKIEAKDLGKILYQFNQLRGYAGGSNNEDDGKKKKEEITEEPEKKKSYEVITQKVKILSVEKADRNYKAKGGKNKGQELPLFNITFLFDDREKEGTTILQNLEVDKEEELEIRIKQTKNGENIIVALPQKTNWKKQMEATEEKIKTEKLFVGQLLLNDLLNSRWIKVRNRVIMRNRYQQEFDAIWEEQAKHHAILNDCPSDKLSSLASYLYPGSSESQNKLRTEAIEGGLKYIIKEQVIYYQRPLKPQTDLISKCQFEKDEKVIATSHPLFQEFRCWKQINQLYIRSKGEFYNEKKGKTIYKYTDRYLTNEQKNDLYLKLQNQKQVGFSEVAKIVGLKNDKTEYLNGLNVKAKLKGCDTTITIQKILGDEFDTIIKQDKEIILKIWDSIFDLNNSGNEYDVDSKIVSSLINILKASLEENKSITIALKLAQNINYPRKYANLSAKAINNILPLMQCRPVNINDTIRENFENIKHAIATGELKDGVEPYMVDYVNSNPNIIEIGGMMDSFAASLVYGKHTSANINATIKNYHDIKFNPKRNLRNPVVDQITNEALQVIKAIWKEHKFNPDELEIRIELARDLKNSAAEREKIYKAQLNNQKQNNKIKERLAEARMPITDENVVKYKLYKQQKYLSPYSGSTLELSLFNEYEIDHIIPKSRLFDDSISNKVLVEGFLNKEKDNRTAWEYISQQNTKHKIYSIEAFIDAVNENYFGRKKKNLLLEKIPTDFIERQIKETQYIALAVKTELAQIVGSNNVKSSTGMITDFLRSRWGLKKMFMELTESRFKQMELWDSSSKWVDRYFDEEKKRNVYEIKNWSKRYDHRHHSLDALVVALTEQSHIQRLNNLNKELQDWLLAHQDEIKLEVKEDETILEAFFNLEENRREEIQKSIEGFRKFDRPFDDLVNQARAHLEAMIVSHKPKDNLTIQLNDKTKKKEIKIRSALHEATLYGKLNGQDTKTMNISNLTAKDIEKIIDPVLKAEVNKHKNKGEYSSMKEAFSGEGLKAFNESRFQRKKPLSLKPPVFKLKIYYNTKEVKESSLQRLYENNDKLSVKTGSNYLFLVMEKKGGKAGEKERVFDIVSLYDAAEIARIEWKNQNKEFKKKIYENYLTINKADKVLFTLQQNELVYLPENVDDPILNFATDEFVQWISKKENKAKFNKRVYKVVKFTGKDCFFIPHNYANAISIAKDLTDEQKTRLRAQYGEKKIPKKELNFEEFGSFGTSAKTEVNENFVKILIDKNYSIEPIKIQDYCIKIKTDWLGNIFLT

SEQ ID NO: 23919 - protein, 1085 aa, unidentified
  REGION 1..1085: note = Cas Enzyme sequence
MSRTLGLDIGTNSIGWALIEDKKEIIRSGVRIFPVGVQEEDFLKNGSEVSKNIARRMARGARRRRFRFKLRRKQLNKLLQANSMLPDVEEFFSTRELYELRVNGLDEKLSLTQFGRILLMLNKRRGFKSNRKSAADPKKKKEEGIVIEEISKLQQQINDSGLRTLGEYFYSLFKKADNEKQWPNEHTPIERIRDRFVGREMYEKEFNLLWATQAKYYPRVLMPELKTEIGSETIYYQRNLKSQKGLVGKCRFEPSKRCAQRSSLEFQEYRIWQQIWMVRFESGERIGQELTVEEKQKVCAALMKQHKMTETETKKLLDIPRTDKMNDVFGSKGILGNRTIADLIDALGVEMYDRLTDAQRFEFWHILTYTDNTDKLKEIVRNKVAQNIIPKLTDEQLDAYSELNLEEGFGNLSKKALDKILPHLRTGLPLTEAIIKAGYDPTKRIIKGKVVELTKIPPLASNELRNPIVQQMLSETFRVVNAIIKDYGKPEMVRIELARELKKPKKKREEARGNAIRKRKQREDYAEFLTKRLKKHIEPNSIEVKKYELWLEMGCADDNLDNLDSFIRNGRITDAIKYRLWMECGRISPYSGKVISLSKLFSPEIQIEHILPYSQTMNNEFGNLCLCEVEINMKKGDRLPAEYFESIGQLDKFKSNVARLQNEGKRRRFLSKEIPEDFLNSQLVNTSYAGRELAWRLSTVFPPIEKGEKESPRIQVVNGYATSDLRRLWALNSILSKGDIDTKNRGDHRHHAIDAITIACTTPKIMHTLSSSSKFNTRGLLTNDEIKEPWKRFLDDSAESIKSIIISYRNQKRLVGTKPNKIKSKDKEKYPKGYMIRNAKTIRGALHEETLYGSIQQNEEQRFVTRWPISKFTEEKQLDKIVDPKVREILKKRVKKYSSLKKAFEPNDKDPILMYSKKGVQVPIRHVRVINPGEHLEEVRPGVFVEPGNNYTIAIYQDPETKKRSFETISFYSAVQRSLQNEPIVKETFDGRPLLYALKQRDIVVRYDEGPDEIDWSDMEYLRKRLFRVRKFDVKGIVYLDYLYASKLNDKEDRNTLFFQLSPNTLNCVHIELDALGNIIRKEGV

SEQ ID NO: 23920 - protein, 1421 aa, unidentified
  REGION 1..1421: note = Cas Enzyme sequence
MKRLGLDIGSSSIGWALRENNLIIQKGVITFQSGMIKGQSGYSSPTKDRREARSKRRLIQSKKYRKFQLLKILQNEFVPLDEIELENWIKYKKGKARKFPENENFLKWLSCDFTYLENGVKYKNPYELRVKALDEKLGKHELGRALYHLVQRRGYKDIGETDAETEKQKERRKEGGFQKALDKTRTIAEALKKEFLDKGERARNQYPYRDEYEKELLLICQAQNCDNDFIQKLRKAIIWQRDLRSQKGNIGKCTLESDKPRCPVSHPAFEIFRAWCFINTIKYFDVDGIKQSIPHDLRNELFKQLFLKKDKNFKFEEIRRFIDKHFKRKGKYNYPYNKEKDIYDSSVAGMPVCSGLIKLFRTDIKDAIAIIETYNIGNAPKIINGYSIYDLWHIIFVFDKRANKTFLKNFANTKLKIENEKSKSGDEYNPVEKLKDNFQSGYADLSLKAINKVIPFLKEGYLYNEAVLLAKIPELLGEDWKKEKESIKSILQNSNDFYQRHKIIIDIANNLIDTYKGLEAPVFGYQDFEYSLDKNDISDILNASISYFGENSWQKRTDQEEILLAVKKEYESFFHDAKRAYRKVPTLTDIFEAQLSENRIHVNGELYHHSNKENIYGEKIKDKKTGMDMLPEPRIDSIKNPMFNKAMNILRKLINELIVKEIIDEDTEIVIEIARELNDNNKRAAIERYQRERETKREKYREFLKEFKEKEQSSVNVEESITTFELWTEQAFEQAENERKEKVTNINSNEILKEKEAIKRYELWMEQKGQCLYTGKMISITQLFSNEIDIEHTIPRSLLPDNTMANQTVCYAKYNRDIKNNQIPFNLDNYDRDWNNYSAILPRLKTWIDIRDDWKERFEKNLKPKGNEDEENKNKRIQAKHYHKMHYDYWHDKIERFINNEIKDSWARRQLTDTQMISKFAREFLKTYFKKVAVQKGSVTADFRKMYSFQEEDEIKNRNKHTHHAIDAAVLTLIPTNSSYRDKLLKKMYEISENEKRQYTENPFQGFNSQVLINDIENNTLIVNYEKDKILKQTYRNVRKRGRFQYLNNNGNEILLKTKGDTIRSSLYAATYLGKIKDVERYDDGRPKREDGDWKYKTGKEEFIFVKKENIDKVKASDKLIDAIVDPVIKEAVRSQKNTPNIRDHQRNIIRHVRIKTSTGKEVKERANYRSKYDYKNKFYSESGSLPYAILLQNSNNSTIEHEMIPIASFEISKVHKKNGRFDMDEYIKEYHPEHVDYPDKKLLKVGQKVIVLKDDKEYEKRFGVNFLTKRLYVISQFSEGSIWMKYHLEARSKDEIKNAVNIAKDKKLREYEMQFGIPEILEDNTIEDNRARKEDFEYRKYRFDTLKMYRFKKLSEKIGIEKVKEIKNELDKFKAISSIIEIEGQTPLLKMSKDSWNYLYEGYDFAISMLGEIKWLNNNY

SEQ ID NO: 23921 - protein, 1429 aa, unidentified
  REGION 1..1429: note = Cas Enzyme sequence
MKNILGLDLGTTSIGFAHVIESDDPLKSIIKQIGVRVNPLTTDEQTNFEKGKPITINADRTLKRGARRNLDRYQDRRANLIHALFKANVITKETKLAEDGKSTTHSTWRLRAQSVTEKIEKDDLARVLLAINKKRGYKSSRKAKNEDEGQAIDGMEMAKKLYEEKLTPGQFGYALLQAGKKNISDFYRSDLEEELDKVWAFQKNYYPEIFTDEFKKELEGKGQRATSAIFWVKYRFNTAENKGTREEKKVQAYKWRSEAISQQLEKEEVAYVITEINNNLNNSSGYLGAISDRSKELYFNKQTVGQYLFKQLLKNPHTQLKNQVFYRQDYLDEFELIWSEQKKYHPELTDEPKVEIRDIVIFYQRKLKSQKGLVSFCEFERKEIEIETGKKKIIGLKVAPKSSPLFQEFKIWQVLHNVLIKKKESKKRMEKKENQSSLVESEKEIFAFSLEERKHLFDELNLKGNLPSKTVFELLGHKIQDWEINYSVFEGNRTNKALYEAYLKILDIEGYDVKELLEVKSNKDEVELDDIQIAASEIKNMIKQIFEILKIDTAILDFDPELDGKEFEQQASYQFWHLLYSYEGDESASGNEKLYELLEKKFGFKREHSQILADVTLSDDYGNLSSKAIRKIYPYIKENNYSTACELAEYSHSASSLTKEEIANRPLKDKLEILKKNSLRNPVVEKILNQLVNVVNALIEKNSKRDESGNIVEYFKFDEIRIELARDLKKNAKERAEMTSSINTAKTNHEKIFKLLQNEFGVKNPSRNDIIRYRLYEELKNNGYKDLYTNSYISREILFSKQIDIDHIIPQAKLFDDSFSNKTVVFRKDNLEKGSKTAYDYISAKHGATQLADFETRIASLFEIGKKNKEEGISKAKYQKLQKKESQIGDGFIQRDLRDTQYIAKKAKNMLFEIARSVISTSGSVTNRLREDWDLINVMQELNFDKFKKLGLTEMVEKKDGTFKERIKDWSKRNDHRHHAMDALTVAFTRHNHIQYLNNLNARKQESNKLHRNIIGIETKETHVAIDDTGNKKRVFNLPIPNFREQAKAHLENVLVSHKAKNKVVTKNKNRTKLKTGEKIKVELTPRGQLHKETVYGKYRYYTSKVEKVGIKFDLPIIGRVANPRYKQALLNRLSESGNDPLKAFSGKNSPSKKPIYLNDEKTAILPEKVKLVWLEEDYSIRKDVTPENFKDEKSIEKVIDIGTKRILLGRLAEFGGDSKKAFSELDKKPIWLNKDKGISIKRVAISGVKNAEALHYKKDHLGNEILDKRGNQIPVDFVSTGNNHHVAIYINDKGEIQENVVALFEALERVNQGLPIIDKTYNQYLGWVFLFTMKQNEYFVFANTSTGFNPKEVDLLDSKNMLAISPNLFRVQKFTKKDYFFRHHFETTVEDNSNLKGTTWKREGLSGINGIVKVRLNHLGEIVKVGEY

SEQ ID NO: 23922 - protein, 1352 aa, unidentified
  REGION 1..1352: note = Cas Enzyme sequence
MKKILGLDLGTTSIGWAFVNEAENENETSSILDTGVRIVPLTTDEESDFKKGNTISINADRTLKRGARRGLQRFKLRRNALLEIFSGIKFIPTNYVYAETGKASTFSSYQLRAKSAEIAVKKEELVQVLLMLNKKRGYKSSRKAKTAEEGQAIDGMKIAKDIFENNITPGQWVYKSLLNGGKRIPDFYRSDLLHELETIVRFQNQFYPTLVNEKLLEELKGKTRTQTSLYFTKTLTIELAENKGNREETKLQHYKWRNEALTKKLDLKELAFIITEINNQINQSSGYLGAISDRSKELYFNQETVGQYQYKLLQNNVHSKLKNQVFYRQDYLDEFEKIWETQAKYHPELTEKLKTEVRDITIFYQRKLKSQKHLISHCEFEKGHKAIPKSSPLFQEFRIWQNLNNIVVKNETTKEPFVLSEELKKQVAQELHFKDFMTDVQLMAFCGLKKGSHTVNFKKIEGNRTNNALYNAFESILVLEGYDELDFSKLEAEDINKIIKNAFIDLGITTSILDFNLSIQGNDFDKQPYYQLWHLLYSSEEDESLKKKLVAKFGFKESHLSYLLNMVLQADYGSLSAKAIKKVLPHLMDGHIYDKACTMVGYNHSSSFTTAQNNERVLKDTLTLLKKNSLRNPVVEKILNQMINVINAIIADPTMGKPDEIRVELARELKNNNEQRNEMTKQINKNTTEHEQIRKLLHNEYGIARVTRNDIIRYKLWKECDGISIYTGKPIEGSKLFSKGYDIEHIIPKSRLFDDSFSNKTICERQLNIDKSNKTAYSFLQEKLTPEEFGHFEKRVKSLFGKISRTKQQKLLMADHEIPEGFIDRQLRETQYIAKKAKEILLEVARNVTSTIGSITDKLRDDWELVDVMKELNWEKYDKLGLTFIEEGKNGERLHKIKDWTKRNDHRHHAMDALTVAFTKPAYIQYLNNLNAKTQGTQKASSIIGIESKYLVRDKNNKLRFIPPISNFREEAKKHLERILISYKAKNKVTTKNKNITKKSGGSHQRIQLTPRGQLHEATVYGKIKQYVTKDEKIGANFTVEYISKVAKKQYREALLNRLVENDNDTKKAFTGKNALTKNPIYLDAEKTNIVPERVKLVWLEDNYTIRKDVTPDLKIDKVIDVGLRTILQNRLNEYGNDSKKAFINLDENPIWQNKAKGLAIKSVTISGVSNAQALHTKKDHSGNDVLDENGNPIPVDFVSLGNNHHIAIYRDEKGNLQEEMVSFYDAVVRLNLGLSIINKKHEKGWEFLFSLKKNEFFIIPNETSNFDGIDFLNPINYNIISPFIFRVQSISSKYYIFNHHLETRNADGNLFKTYKNLAGITYNFFQTTNKLKNIIKVRINHIGQIVQLGEY

SEQ ID NO: 23923 - protein, 1370 aa, unidentified
  REGION 1..1370: note = Cas Enzyme sequence
MKRILGLDLGTTSIGWAFVNEAENENETSSIVRSGVRVVPLSTDEIQNFSKIDAETAAGARTTKRSMRRNLQRYKQRRSAVLKLLKEKGFLKENEAIAENFPNSTHHTLKVRALAPTQKISRLDFARVMLAINKKRGYKSSRKANNQEEGELVDGMKVAKRLNDENITPGQLTYQILVSGKKYIPVFYRSDLKEELMRIWQQQQQYYPNVLTQNHFDKLDGLNQSATKSYLKKEMNIERAEPKGNRDEKKLQSYLWRNQAIVNELNIEEIAYVIAEINNQIFQSSGYLGAISDRSKELFFNNLTVGQFQYNLIKKDSHYSLKNQVFYRQDYQDEFDAIWEQQSQHYKELNNELRKELRDISIFYQRRLKSQKNLINLCEFESHTITVNINGESKTKEIGSRVAPRSSPIFQIFKVLSNINAIRVQKKDASKQEYKLHDDDRLELFKEINWIDSMSDSDFLKWLFKGTKEQPDDYEIKYGKLEGNRTNAVLLKSFIKIAIQSGHNKINYKKAKSELITDLKSCFEAMGIDSGVLELNLKANMQDVTMQPAYQLWHLLYSYEDDNSVTGTESLIKALSKFGFKEEHMPFLINISFKDDYGSLSTKAMHKIIPYLKEGLVYSEAAATAGYNHSNSITADQNKDRTLHDKLDILKKNTLRNPVVEKILNQMVNVVNAILEDEKLGRPDEIRVELARDLKQTVEQRNEEAKYIKRVTTLHEEYREKIKREYGLTYVSKKDLIKYKLYLELKSIGYRTLYSGTYIEPSELFTRKFDVEHIIPQSVRFDDSFSNKTLELRHINEEKGNQTAIDYCDRKGWKEQFERRVENVYKDKEGISGSKKNKLQLTKDQLSDKPITRHLNNTGYITKEALKILFKIVRTAPIATNGSITDKLRSDWELIDVLKELNWSKYEKMGLTYYDENKEGKKLPRIKDWSKRNDHRHHAMDAIAVAFTRPAFINYLNNKHAKSRGNEIIDNIEKKFTYRDKIGGRKFKKPFEDIRAASKSSLSDILISFKAKNKVTSRNNNYTKKKAGRNIQETLTPRGQLHEQTIYGSSLSRLTKLETVNSSFDEYKIKTITSKEIRELLLLRLQSNRNDPKKAFTGKNSLSKLPLVLEDGTEITSKVEIAWFDTIYTIRKPIDPDLNVDKVIDEKVKSVLKKRITDFDGNKKLAFSNLYENPIWLNKEQGIKIKRATIKAVSNAIPLHEAKDVLGNDIVDDRGNKQPNSFVSQGNNYAIALYEDEKGKLNEQVLSFFDAVTRQINKLPVVEHFNELGHKLKFTLKQNEMFLIPTKDFDPRTFNLSDPSNNSILSENLFRVQKITSKDYVFRHHLETTLNNSKDVKGLLYHRVNSTPFLENIIKVRIDHLGRIVHEGEY

SEQ ID NO: 23924 - protein, 1429 aa, unidentified
  REGION 1..1429: note = Cas Enzyme sequence
MKNILGLDLGTTSIGFAHVIESDDPLKSIIKQIGVRVNPLTTDEQTNFEKGKPITINADRTLKRGARRNLDRYQDRRANLIHALFKANIITKETKLAEDGKSTTHSTWRLRAQSVTEKIEKDDLARVLLAINKKRGYKSSRKAKNEDEGQAIDGMEMAKKLYEEKLTPGQFAYALLQAGKKNISDFYRSDLEEELDKVWAFQKNYYPEIFTDEFKKELEGKGQRATSAIFWVKYRFNTAENKGTREEKKVQAYKWRSEAISQQLEKEEVAYVITEINNNLNNSSGYLGAISDRSKELYFNKQTVGQYLFKQLLKNPHTQLKNQVFYRQDYLDEFELIWSEQKKYHPELTDEPKVEIRDIVIFYQRKLKSQKGLVSFCEFERKEIEIETGKKKIIGLKVAPKSSPLFQEFKIWQVLHNVLIKKKESKKRMEKKENQSSLVESEKEIFAFSLEERKHLFEELNLKGNLPSKTVFELLGHKIQDWEINYSVFEGNRTNKALYEAYLKILDIEGYDVKELLEVKSNKDEVELDDIQIAASEIKNMIKQIFEILKIDTAILDFDPELDGKEFEQQASYQFWHLLYSYEGDESASGNEKLYELLEKKFGFKREHSQILADVTLSDDYGNLSSKAIRKIYPYIKENNYSTACELAEYSHSASSLTKEEIANRPLKDKLEILKKNSLRNPVVEKILNQLVNVVNALIEKNSKRDESGNIVEYFKFDEIRIELARDLKKNAKERAEMTSSINTAKTNHEKIFKLLQNEFGVKNPSRNDIIRYRLYEELKNNGYKDLYTNSYISREILFSKQIDIDHIIPQAKLFDDSFSNKTVVFRKDNLEKGSKTAYDYISAKHGATQLADFETRIASLFEIGKKNKEEGISKAKYQKLQKKESQIGDGFIQRDLRDTQYIAKKAKNMLFEIARSVISTTGSVTNRLREDWDLINVMQELNFDKFKKLGLTEMVEKKDGTFKERIKDWSKRNDHRHHAMDALTVAFTRHNHIQYLNNLNARKQESNKLHRNIIGIETKETHVAIDDTGNKKRVFNLPIPNFREQAKAHLENVLVSHKAKNKVVTKNKNRTKLKTGEKIKVELTPRGQLHKETVYGKYRYYTSKVEKVGIKFDLPIIGRVANPRYKQALLNRLSESGNDPLKAFSGKNSPSKKPIYLNDEKTAILPEKVKLVWLEEDYSIRKDVTPENFKDEKSIEKVIDIGTKRILLGRLAEFGGDSKKAFSELDKKPIWLNKDKGISIKRVAISGVKNAEALHYKKDHLRNEILDKRGNQIPVDFVSTGNNHHVAIYINDKGEIQENVVALFEALERVNQGLPIIDKTYNQYLGWVFLFTMKQNEYFVFANTSTGFNPKEVDLLDSKNMLAISPNLFRVQKFTKKDYFFRHHFETTVEDNSNLKGTTWKREGLSGINGIVKVRLNHLGEIVKVGEY

SEQ ID NO: 23925 - protein, 1045 aa, unidentified
  REGION 1..1045: note = Cas Enzyme sequence
MKPLGNFNTNNYSKTSTQNSKKNQVFYRQDYLDEFEQIWETQSQFYTELNQKLKIEVRDITIFYQRKLKSQKHLVSFCEFEKGHKAIPKSSPLFQNFRIWQNLNNIIVKNETTKEPFQLDEDLKNLIAQELLFKESMTDTQMLTFCELKKGTHTVNFKKIEGNRTNTSLFNAFEKILILEGYDELDLSKLDSLDIKNIVKSAFSDLEINTAILDFDPTIQENDFDKQPYYQLWHLLYSAEEDEILKKSLMSKFGFKENHIPFLLNINLQADYGSLSARAIKKVLPHLMDGHIYDQACLLTGYNHSSSLTTEQNESRILKDHLGLLKKNSLRNPVVEKILNQMINVINAIIEDPTMGKPDEIRVELARELKANNEQRNEMTKAINNATKTHDDIRKLLTVEYGISRVTRNDIIRYKLWKETGGISLYTGKPIEASRLFTKDYDIEHIIPKSRLFDDSFSNKTICERTLNIEKSNKTAYSFLREKLTPEEFDQFEKRIKSMFGKISRTKQNKLMMADDQIPEGFIDRQLRETQYIAKKAKEVLLEVSRNVTATIGSVTDKLREDWELIEVMKELNWDKYHKLGLTKEEEGKNGERLYKIQDWTKRDDHRHHAMDAITVAFTKPAYIQYLNNLNARTNTDKKGNSIIGIENKYLKRDKNNKLRFIEPMPNFRSEAKKQLESILISYKAKNKVVTNNKNTTNKSGGTNQKIQLTPRGQLHKETVYGKLQQYATKEEKVNANFTQEYISKVAKKDYREALLKRLAENDNDPKKAFTGKNALAKTPIYISLKDNIVVPEKVKMVWLENNYTIRKDVTPDLKLEKVIDGGLKEILHNRLNEFNGDPKKAFVNLDENPIWQNKEKGIAIKRVTISGVSNAQALHTKKDHFGNEILDENKNPIPVDFVSTGNNHHVAIYRDDKGNLQEEVVSFYDAVVRKNLGLSVINKTHKNGWEFLFTMKQNEFFIFPSDSFNPEECDLLNPENYHLISPNIFRVQKFTIRDYFFRHHLETTVEDKKELKEISFKRLGLNGISNIIKIRINHLGHIVQIGEY

SEQ ID NO: 23926 - protein, 1437 aa, unidentified
  REGION 1..1437: note = Cas Enzyme sequence
MKKILGLDLGTNSIGWALVNEAENENEKSSIIKLGARIINYDNFVSTETGKESKEPEKDFRSGKGISPNAGRTLKRSMRRNLQRYKLRRENLIEILKGNGFISNETILSENGNRTTFETYRLRAKAATEEITLEQFARVLLMINKKRGYKSSRKAVNTEEGVLIDGMEIAKKLYNEDLTPGQYCIQILQSGKKQLPDFYRSDLRAEFDKIFEKQLSFYPEILSLDLKEELRDKKRDAVWAICSKAFKEKGFELVGTKRQGNAAEQKVENYAWRAKGITEKLDLEQLVVVLQQINIQINSASGYLGAISDRSKELYFNKQTVGEYQMAVLDKNPNASLRNMVFYRQDYLDEFNTIWEKQAEFHPELTKELKHQIRDVVIFYQRRLKSQKGLISFCEFESRKIEVKIDGKKKTKTIGSRVVPRSSPLFQEFKIWQVLNNIEVFGKGKKSKKQKGATLFDQIEDPLEYGGRRELYQEEKELLAAELLIKKELKKADVLKLLFDNAKELDMNFTSIQGNLTQAIFFNAYKQIIELSGHEIDVEKSVASAIIKAVEEVFNALGVNTEILNFDSDKELDKQPMFKLWHLLYSFEGDESKTGNEKLTNKIAEHFGFEKEYAAILANVTFQDDYGSLSAKAIRKILPYLKAGNKYDVACEYAGYRHSASSLTKEELDNKVYKERLEILPKNSLRNPVVEKILNQMINVINSIIDTYGKPDEIRIELARELKKNADERKKLTEEIAKNSKLHEQYREILSKSPFNLTFISRNDIIRYKLYEELKDNGYKTLYSNTYISPLAVFSGDFDVEHIIPQSRLFDDSFSNKTLELRSINIEKGNKTAYDFIKEKYGETGSDNSLDNYLTRIEILYKNGVLKRAKYNKLKMQEKDIPDGFIERDIRDTQYIAKYAKTMLGDLVKFVISTTGSVTERLREDWQLVDVMKELNWGKYNQLGLTEEFINEEGRKIRKIKDWTKRNDHRHHAMDALTVAFTKRQIIQYLNNLNARRTNEELGISNTEKENQNQFAITSDDIKLNTKDVLGIEKKELYRNDKGKLLFKPPMPLDEFRAEAKRHLENTLISIKAKNKVVTQNINTTKKPAGVNKKIQLTPRGQLHNETIYGSQKKYMVREEAVNAKFDAEKIATVSKPAYRVALLQRLQQFDNDPKKAFTGSNALSKKPIWLDELHTKQVPEKVKTINFETVYTIRKDVSADLKLEKVIDKNVRARLEARLKEFNGNAKQAFSNLDENPIWLNKSKGIAIKRVTITGISNGEPLHNKKNKEGKLIVDENGRKQPVDFVSTSNNHHVAIYRDAEGNLQENVVSFYEAVSRKNLGLPVIDKEFKAREGWQFLFSMKQNEYFVFPNAETGFKPSEVDLLDPENYHLISPNLFRVQKFTIKDYFFRHHLETNVEMNSLLKGKTWLRYGLNGIEGIVKVRLNHIGQIVSVGEY

SEQ ID NO: 23927 - protein, 1222 aa, unidentified
  REGION 1..1222: note = Cas Enzyme sequence
MKKILGLDLGSSSIGWAFIEEDKEKSSIKRLGVRVIPYSGDEKDQFSKGQAITVNKDRTLKRTARKTNHRYKLRKKALVDILTQNGMMPTSDQLLLTSAEKLFELRSRAVTEKLGLPDIGRILFHLNQKRGYKSSRSGNTDEESGKKLSDYLSDLRERKEMLEHENLTIGQYFAKEFKANPFFQTRKKVFPRECYIDEFNRIWKKQHEFHPTILTENLKIKLRDEIIYYQRRLKSQKGLVGECQFELHHKVAPRSSPIFQLGKIWESINAISITNKINESYILTIEQKKAIFNHLDQNEKLNQSKLFEIIFGTKRPAGWHADELVKKAGIQGNLTKTTLRKCFSDVGLDPASPLLNFDIFKTETVVDKETGEISEKILVDTQFEKQPLYQLWHLLYSIDSPESLVKTLMHKFQFTQEQAESMAKLDFKKSGFGNKSAKAIRKILPALTQGMVYSEACNAVGYNHSDSLTTAENKARELKDRLEQYKKNSLRQPVVEKILNQLVNLVNSIIQDPDLGKPDEIRVELARDLRQSREERNNAYSQNIQKDKYHKEISTRIESEFPGVKITRRLIEKFKLYEQQNGTCLYSGRKLELSQVLRGESVDIDHIIPQSKLFDDSFQNKVLVLRTENEKKDNATAFDYMNTKSKEEFNQYIERVDQLFADKKITRSKRDKLLMPENSIPNDFINRQLNETRFVSREAMRLLKDICYDVYATSGSVTEFLRTQWGYNEVLQQLNWQKYELAGKTENGKIIGWSKRDDHRHHAIDALVVASTKQSIIQKLNRLNSTATREDFLKTIEGKSESGWQAKRSLLEEYVRVIRPFKTNEVKEAAGQILISLKSGKKVATLGRNKTKSNKPIPEQKTFTPRGQLHKEQVYGKIRRYSETKIPLNGRFDKLDIIANPLEKDLVQARLARHENDPKKAFKDLDNDPIWTSPAKTKALTHVTVWEEIFVYKYTLDQTFKEKDIDSIIDVGVREKVRARFNDGKGQKDHPLKNLQNDPIWLNEAKRIPITSVRCNTGLKDLVPLHYVKNGNTYPHSKAPKDSKPADFVSTRNNHHIAIYRTPEGGLEELALTLWEAVERKKYGLPVVITEPAKVWDQVLLSGLDNQEILQALPKPDWTFVTSLQQNELFVFRMTKDEITNALNNNDFAVISPNLYRVQKIATKNYFFRHHLETSVDDKKNGGEMQSKKLEKVIIIQSLDALNEKKPIKVRINQIGAIDISP

SEQ ID NO: 23928 - protein, 1355 aa, unidentified
  REGION 1..1355: note = Cas Enzyme sequence
MKFKNVIGLDIGTNSLGWCLIKEYEDGTVEIVKTGVHIFPIGTIVDDKSNKEKTKNEQRRIYRGASRRRYRFKLRREHLEKVLSDLGMMPNYSKLHKAKGKGQSYELYKLRAEAINPDIQLPLEEIGRIFLLLNKYRGFKSNSKKLGPKSQEDGQVKRGCEELQALIERSGSQTIGEYFYKMHQIGNELYEQNKWHNPNEPVDERAYNEETGEFVLFNSNGIRRHFGRYTLRDMYLHEFDLIWQAQKKYYPHIFTGSKSEYDLIMGLPYRERIEAIKSFRQTNYWNIREYCIFYQRPLKSKKRFISNCSFERGQTKVNATPDNQVGGNKRIWLKKAKKGCPISHPLFQEFRILQKLYQIRYSSTEEDIFQAPLKKEWIDVLSKAMSTQNEIYLNKTKKLQNENEIWFGKVLMENGLIKNDELFTFYIDKTDEDLDHEEKNANRITGNVTYASMKEALGEDTFNSILNELIQRQEEISPGNTQEVQEPKTFLLWHHLYIAKDGLLKEEDWLQCILTDKSKWGFTAEQAKRLIQIGLQPEYGSYSIKVLKAILPFMRNGSNEYEALAAVNRGYINEDGTIGKKVELKQKISQIKYQELRNPVVERAVSKAIKVVNEILKKYESEIDRDSLTIRIESTRQLRKPRKERENERRQNADKDRLKEQYASYLNKRKVDLNFNRDIYKYDPLVSKYELWLQMNMNEEDALFEKEFKAFSKITRSDDKLKHKLWLECGRVCPYSGKVINLTDCFSSEVEIEHIIPLSRSLDDSFNNKTLTYRKINTDKGKMTPFEYLSKMGGDHLKEFKARIHRKGMNAFSDEKKKKFLAEKLDPGFLNQQLSNTSYIARFTISKMQEVCRSVYFTNGSITSELRRKDWNLSNLLEKIRFNEKTGIDIDQTFAQLKRLKQDFTKWAQKKHMSTDFKVNWDEISQNIDAIEYFEETGNDIIFWHSQAVEFDQFKNQSNKKDRSDHRHHAIDAFITACVTPRIVQTLSTYNALKEETNLPFRDYIDRSFNYFALKSSIENILVSHSEKQTLIKKRKNKIQTSHGVTEQTTYAPQGKLHEDSFYGKRNGHTVRRIKLFDDQSQEKLAFKSIDDLYYIVKGEKKWTYIHEKQIHEIAELRLNKLGDKAFTQDELEKNPFYCTSPFSPDESLSKKGKPLPIIKSVRKRFNIDRTLINLPIKKGKEVLSTNRYTNNESNFIIAFYKNGKKRFARPVSFFQAVKNKTNGKSLIPDEVEYKDVIYGIDQDLPWLKPGDLVIICDPNSETKINDRIWIRDRLFKIARVGTLITPNEKYGEYEYGRISLVKAHIANTNNYPNQKDIEAGRLQNSFTISHDKFQAIKVRIDILGDPVAFGADCF

SEQ ID NO: 23929 - protein, 1225 aa, unidentified
  REGION 1..1225: note = Cas Enzyme sequence
MKKILGLDLGVSSMGWALIEQDEITPKKIIDMGVRIIPLSTEDSDEFSKGNKISKNAKRTEKRTQRKGYDRYQMRRSQLQDVLKKSSMYPSKELFELGALELFSLRAKAAITKVTEQEFGRILLHLNQKRGYKSARISESADNKDTEYVAEVKSRHEMLRQEGITIGQYFARELEKSIHYRVKGQVFPREAYKEEFDAICKAQGISTDLVDKLRDEIIYFQRKLKSKKGLVSICEFEGFFTKDKQGKERFVGPRVAPRSSPIFQVCKMWENVNSIKLKTKKGDDLEITLEQKLQIFNHLNENIRLSLPELLKILGKKRDEVYSNKQLEKGIVGNTTRSKIAEILLPNEMNLLEFNLTISEDQQEVYAYSKETGEVLEVSNRKKVNSGFSEEPFYKLWHTIYSISEPEECNNALLKNFNISENSAARLSQLDLTTSGFGNKSAKAISKILPYLMQGHVYSTACQLAGYNHSNSITKEENLQRKLLDKIPILPKNSLRQPVVEKILNQMIHVVNAISESYGKPDEIRIELARELKQSREERNDTFKNLSKRERENEEIRRRLEKEYGIRPSRNNVIKYRLFHEINNEEVRTNASCIYCGKHFGLRDALSGDSVDVEHIIPKQLLFDDSQTNKTLSHSSCNREKNNRTAYDFMASKSKQELDDYIERVNSLFKDKLISKGKRDKLLLPATKIPKDFIERQIRETQYISKKAKEILEQACRDVWSTSGTVTAHLRKLWGWEDALMNLQLPKYKEAGLTEWVEWETNDGNKHRKEVIKGWTKRDDHRHHAIDALTIACTQQGFIQRINTLNAQHTRDEMFNETKDHVYREKLTLLDRYLISKCPFSTAIVENHADRIAISFKAGKKVATLSRSKKATGKNVTTGVLVPRGPLSEETVYGRIMSIEKRKPAKYLFENPQLIFKPRIKNLVEERLAKFNNDVKAAFASLKTDKIYLDENRSVELQYGTCYKPEIVVKKPISTLKANQVADIVDPAVREAVGSRLKQYDNNVKEAFKNLEQEPIWLDKAKTIPIKAARVFTGLNAVEPVKKDLDGRDIGFVKPGNNHHIAIYKDAEGKLMEHACTFWHAVERKRYGLDVILQTTKSVWDTIALDPEKFPQSFIEKLPPDGLTLATSFQQNEVFLLELDEDKILDALEKENYSLLSKHLYLVWSVAESDYWFKHHLETKNSELKKENSAKESKRFYRIIGPNSFLKKNPIKVRINTLGKIILRN

SEQ ID NO: 23930 - protein, 941 aa, unidentified
  REGION 1..941: note = Cas Enzyme sequence
LNWDDEKSDDFTDIDIQQGYGSLSKNAITKILPFLQQGKIYSEAVLFANLSRVLGKNEFARRDSEIVVAISKAIKEVEEEKEKLNIVNGLIQQFFGETNSYRTKGVDEKLKEQAEADVHQKLTSFFGEEDWNNKPQEEQQQYFDFVLDKYLAFLDGKQSDEEKASSSQHKAVTIDYYKLPRLDQAIKGILKKKFNASDDGLKHLYHPSDIDIYPKATGNKLVDPQPPSRGWKNPMAMRTMHELRKLLQYLIDVGKIDRDTKIVVEMARELNDANKRWAIQYYQRKREEENIEFAKAIVGLAREKYPTLSDADVNNIDKIRLWWEQLQNGDDLFRQIKALKEDVQKYRLWKEQQCQCIYTGKLFSITDLFDGTKTQFEHTFPASDSFDNSLANLTVCDASYNMNIKKDRIPTELPNYSKESNGYSPIEKRIERWIQKRDLLRSRIEENVIGTKKAIKRGDIEWKNKLVRDRHMLQFDLEYWDKKVKTFTLKEIPNWWKNSQLVDTQIITKFSRAYLKSFFNRVDVQKGTITAEFRKIYAIRGDEKKDRSKHSHHAVDAAVLTLIPCSARRVDILKRYYQSIESGNRKSFIETPYPQFSISHVLEIEKSAFINHTDNDRTLAKTKKKDRVRGRILKGKDGSVIWKQGDSIRGQLHKETFFGAIKPPLYENGYAKMENGKYMVRRKNDVEEIWIVARKPIESVDIAKDKIIDEVLKKHIEKQLDSGSIKSITEALDFNGKKIRHLRCAFKAGRGYLTKEKAIELRRHSHPPKQEHRQYVLVQNSQDGNYLYLVFEKREEAKLIRKARIVTLLETSGKDFPGIKGLWNDNGYNQLDGILLKQIIKAGQRAIFYSESIDELKDLSEEELRNRVFVVYKFNESGTPDIYLKNMKEARPNPEIDKLCENSFDPQKYQAGLSLKVSKLNCVFEGKDFEIKPDGEVKWLT

SEQ ID NO: 23931 - protein, 1457 aa, unidentified
  REGION 1..1457: note = Cas Enzyme sequence
MASKTILGLDLGTNSIGWALINQNFDEKEGKILGMGARIIPMSQDVLGEFDKGNSVSQTAERTKFRSARRLRERYLLRRQRLHRVLNLLGFLPKHFSDQIDFEKRQGQFKNEAEPKLAYGNEGFIFQNSFREMLEEFRVSQPTLTENGKRVPYDWTIYYLRKKGLTKKIRREELAWILLNFNQKRGYYQLRGEEEEENANKRVELYSLKVVDVKLDQRQNDKGDIWYSLMLENGWIYRRSSKTSLFDWKDKIKDFIVTTDLNNDGSIKKDKDGNEKRSFRAPGADDWTLLKKKTEQEIDQSKKTVGTYIYDSLLKNPTQKIKGKLVRTIERKFYKDELRAILEKQIQEHPELRDEKLFADCIRELYRSNESHQNTLKGQGFLQLFINDIIFYQRPLRSQKSSIGNCSLEKRMYKDVNGVQQTVSLKAIPKSNPVYQEFRIWKWMSDLSIYQRDDDRNVTAQFLKSSEDYEKLFEELYSRKEIKQDALLKFLIEQTGLKGKAANTEVGKYRWNFVEDKIYPLNETGATIANRLSKVEGLPDHFLTKEREQHLWHVIYSVTDKIEYEKALMSFARNQHIDEASFVESFKKVPPFKPEYASYSEKALNKLLPLMRVGKYWNWDTINTSSRERIDKIINGEYDENISTRVRERVKFLTEHSHFQFLPDWLAKYIVYGRHSEASNLIKWNSVDDLTNYLNDFRHHSLRNPIVEQVVTETLRVVKDIWQRYGNSKQDFFDEIHIELGREMKNTAEDRARITSQITENENTNLRLKALLAEMMLQGDVENVRPYSPTQLEILKIYEDGVLNSDIEVPDEILKISKTAQPSSKELLKYKLWLEQKYRSPYTGEMIPLNRLFTPAYEIEHIIPQSRYFDDSFGNKVICEAAVNKLKDNQLGFEFVKNHRGEKVETGFGNSVTILEESAYQDFVKVHYAKSRSKRIKLLMEEIPEKMIERQLNDTRFISKFISSVLSNIVRAEKDDDGVNSKNVVPGNGKITSQLKQDWGLNDVWNDLILPRFERMNEVTKTTAYTAYSKVHQKGLPTVPLEFSKGFQKKRIDHRHHAMDALVIASATRDHLNLLNNQHANSDTKRYDLQRKLKIFEKVKYFNKKENRNVEREVPKEFLKPWANFTADAKAELETIVVSFKQNLRVINKATNKYESFRDEDGNLRIGKDGKPKKGLIPQTKGDNWAIRKSMHKDTISGKVDLHRIKASKGKILSATRKSIDPSFDIDTIETITDTGIQKILKNYLSSRDGNPELAFSPEGLEEMNKNIEKYNEEKPHKPIYKARVFEMGNKFPLGKVGNKKDKYAEADKGTNLFFAVYWDEEKGERNYESIPLNEVVEHQKWRATLKKEEQKQIPMIPIKPENGKFLFNLSPNDLVYVPDEDYISMKDVNPKGIYKVVSFSGKQCFFIKQEVAASIVNKVEYSTSNKMERSIDGKMIKESCIKIEVDRLGEIKGKIS

SEQ ID NO: 23932 - protein, 1245 aa, unidentified
  REGION 1..1245: note = Cas Enzyme sequence
MMRKILGLDLGSSSIGWALIQEDKNETSICDLGVRAIPLDTDEKNGFNQGKGISKNQNRTAARTARKTLNRYQLRRKALRIQLEKMQMMPSTELWQLSSLELYKLRSNAVKNPISLQELGRVWLHMNQKRGYKSPSKGYSEDKKETAYVAEVMNKYNKLKKANLTIGQYFYNELNNSLIGSSHFTTYRIKDQIFPRQAYLEEFEAIWETQSKAHPNILTKEFKEIIQNAIIFYQRPLKSQKGLVSVCEFEGMERRIKTTRGEKSVFIGPKVAPRSNPLFQVVKVWETIHNIRLKNKRGVELEITLDNKKRIFDYLHTNENLTYSELIKILNVSKTEYAGNKQLVKGIQGNATYIAISNILGEGHPLLQFELNIDLFDQEVSHLDRNTGEVLGNNKLKILNDSIEKQPLYILWHTLYSIKDETECFNALKKNFNIDDHHANLLSKIDFNRLGYGNRSVKAMRKIYPYLAEGFDYSTAASFAGYNHSFTLTKDENERRVLRDTLELLPKNSLRQPVVEKILNQMINLVNCVIAKYGRPDEIRIELARELKQSKEERNKAFKENESRERENDKIKESLKHYQVNATRKNIIKYRLFHEIKKEDSKLNAQCIYCGQSFGISDALNGDEIDVEHIIPKAYLFDDSQSNKTLSHRKCNAEKRDNTAMDYMATKGDIVMNAYIERVNELFKKNIISRTKKDKLLMTKDSIPQDFIDRQLRQTQYISKKAKSILEQVCVNVWSTSGSVTEKLRKLWGWEDALMDIEFEKYKNLNLTEYVEWESNGKTHRKEVIPGWSKRDDLRHHAMDALTIACTKQGFIQRLNTLNSQHTRSEMSSIVENSGREFRDKLTLLEKYLITQKPFTTNQVQNALSNVIISIKSGKKVATKGINIINRKGKNKFIQKNIIIPRGALSEESIYGRIKILEKNVVIDKLFDDIEMIENPYIKSLIKERFEANHKNKKNTLKSIKKSPIFLDSDKNIELKVANRYSYEYVKKIPLASIKQNKADKIVDEKIKNLVVERLAAHNNNVVSAYSEPLYYDQDKSIKIKSVRCKTGLTSLEPVPVYDSENKIHYQNFYKPGNNHHIALYKDSEGNWHEHIVTFWHAVERKIHKLPVIIKQNSQVWKAIYENLDKYPESFLSKLPDPEWIFIESFQQNEMFILGLSHDEFYDFLTSGSISGISKHLYRVQKISKANYVFRHHIESTVEESNNAINLKKYYIVRSLKSFQSLNPIKIRINILGKIVSDKHPNSDG

SEQ ID NO: 23933 - protein, 1379 aa, unidentified
  REGION 1..1379: note = Cas Enzyme sequence
MEKILGLDLGTNSIGWAIREVNSELENQIIDNGVLTFDKGVAEDKSGEHPMVQKRTESRGKRRNYQAEKYRKWNLLQSLIENKMCPLSIDELNDWRHYKKGVGRKYPQNEKFINWLRFDFDGDGKPDFERLGFNKHESYYLFRDLIVDEKKTEIFKKEPHIIGRVLYQLVQRRGYNDGQNIDETERDELSKTIMNGGGEAGAVGVNDILPYIEKHKTLGAALYHLQKEQNVRIRKRYNLRSHYEREIKEICRVQNLEHLFKAFWGAVIWQRPLRSQKGLVGVCTFEQNKRRCPISHPLYEEYRTWVFINNLRIKAIADDGTKTDAEQHALLLSVLKNTVYPQFLKASDFKLSSIAKELRKKGYEITARFPDDTKVVNLSFLSKMKEIFGEGWEEKTGWTKVLNGILDKPKYNIEDLWHLHFVKSDNKDTGETGFDFLKRFGIEKLKLEETKSETFAKIRLQQGYATLSLSAIKKILPYLRQGFIYSEAIYLANLHKVLGMAKLSENIITHFSEEVKNIIKQASFEKKLVQSVNELINDQLNSKNRFGMDASYQLDEDDQKDIEQKLSECFGKHSWDNLENEKKQIARTTVGNKYLAFLQKKIHAKNVFEKTERLQNKIFKWLKDTYHVPDTNIKYLWHPSEQETYRPAVEKNGKHYLGSPEPISKGFKNPMALKTLHKLKKLINYLIAVGKIDEDTRVVIEIARELNDANKRKAIERWQRDKEKENETIKKTIDEINKECKTDFNREDKNIIDKIRLWEEQMRTCIYTGKTINLCDVLNGVKYDYEHSIPSSMSFDNELKNLTIADSYYNREIKKKKIPYECPNYDKEFVHNGITFPPILSTLQTMFGRIIETEKKVKGKIIKQKNFQKLVELEELFAEWKAKTSEDKQIKDNIIVRRHLIKMELDYWRYKLHTFTTSEYKAGWRNSQLRDTQTITKYALPFLKTVFNKVDVQKGNITADFRKIYKIQDRLEKKERTKHSHHAIDAAVLTLIPPAAVRDKILLHYNEANENNQGYHEKPRQWSNFHQQFIIGIEDDVLINYQADHRTLTPTYKTVRKRGKVQFVKERMPNGKWEYKLDGAGSKIPLTAQGNSIRGQLHKESYFGAIKNKGELNLVERYPIAAFTSINDCKNIVDDAVRVVVKDTLEKRMRDGLSFDKAKLDPIPFPNGKAFIKKVRCKVAAGRGYLTPEKAIEIQKHNFLSKHKYKQHIYAQNDQNTYCLFYESEFENKTERAFRIIGLFDLSKLGIRNEKDLFQDRYYNKIEIGRGNKKKEIALTHILKVGTKVIFYKEHSEELKDLSNNELQKRVFRIYKFNETGAPLVYVQNQIEARPNDKLGDGETVFNKEAYQARLKLVANNFNCAIENKDFEIKLDGEIVWKI

SEQ ID NO: 23934 - protein, 1436 aa, unidentified
  REGION 1..1436: note = Cas Enzyme sequence
MNKILGLDLGTNSIGWAIRTPDSTNNQIEKFGVLTFNKGVGLGKTGEYSYAAERTKKRSTRRLYQARKYRLWATLEQLITGGYCPLPIEDLNRWRHYNKEEARKNNNAGRVYPVHNAAFDAWIKLDFNNDGKPDYTSPYQLRKELAETKLDFTKEENRFKLGRALYHIAQRRGFKSSRKSADDVKEKEVDTVDENETELQKSEKKKTNKLKELFPDYDSSVPIGVFLANKENQGLRIRLDITQYLVRENYKDEIKYIFQFQRLKFEHPLYVKLVESGKNKNDGSIFYKRPLRSQKGLIGKCTLEPSKYRAPISHPSFETFRAWAFLNNIKYKENNGWKELPLELKQEIYLKLFFRKSKGYFPFSEIADLIKDKGKHWELNYKPKTTVTACPVSARLKDIFGDDYLNVKIQKAKAPKTDKAYYDIEDIWHVLFSYEDQEYISEFVEKKLKLEPEKVKQFVIAWNALPVGYGMLSINAINKINMFLEKGLIYTEAVLLANIPEIIGRKLWQENEKLLLDSIGGVIDENRQEKTILNIVNSLVSKHKNLETNEKFGGNNYKLVESDLNEIQTAVEEQFGTNKWNSFPDEEKKIITNTVKDCYQAYFISSGLTRKDIHDERYFEVKSNNKVYYKSDSGYYRLPKLIDTLGEFLQLNFNVADKLLSKIYHPSEINIYPPAKPDKDGVLKLGSPKTGSFKNPMAMRTLHELRKLTNYLIETNQIDNETRLVVEVARELNDANKRWAIETWQRQREAENQEFEEAIKQLLNKDKDEKIPVDDIDKVRLFYEQNTEQTLPPVAEETKEAKGKKKKLAEKDVAIRWSGHGKKLIDKYRLWKEQGYQCLYTGKYIKLSDLFNENVIDFEHTVPRSKSFDNSLANLTVCYHDYNRTIKKNQIPTQLNNYDKDFDFGGSLGKCSAILPRLEPWKEKVERIKQQIDFWKTKSKKATDKGWKDDAIQQRHLWKMELDYWQNKVNRFMITEITSGFKNSQKIDTQLISKYAFHYLKTYFDKVDVQKGSITAEFRKIYQLQVADEKKDRSKHSHHAKDAAVLTLIPVAAKRDAILEKYYEAKENKAKFTDTEPYKGFKREFVWSIDDSVLINNITNNQELTPAKRKIRKRGKEIFIPGTSKNMWATGDSIRGQLHQETFYGAIKPAQQGEKGNLLKDENGKFIQQEEIKYVVRVPFQFKKDASTPGFKTLDEIKKQIVDEGLKQQIEKQVNEAGGLKEAFENGIYLLDKDGKPHGNKIRHIRVWASVSEPLAIKKQTNLSDKEYKQNYWAANATNSYFALYKGDNKKDFDFRNLFDTAKVKSVNLVRNPEDLFQPKITLTKGKKQVELTLVSILETGTKIILKKDENDDLKTLSNAELVKRLYVYTNFEKDGRLNFRYHLEARNKIEDDYTESEVDFENPKPTLRFSYSKYEFLVEGYDFEIKMDGAIKWKN

SEQ ID NO: 23935 - protein, 1458 aa, unidentified
  REGION 1..1458: note = Cas Enzyme sequence
MAVKNILGLDLGTNSIGWALTEQNFEIKVGKILGLGTRVIPMSQDVLGEFDKGNSVSQTAERTRLRSTRRLRERYLLRRQRLHRVLNILEFLPKHFANEIDFEKRLGQFKGQAEPKLAYYNNKFIFQDSFSEMLEDFKAHQSTLVVSNKRVPYDWTIYYLRKKALTQKIQKEELAWILLNFNQKRGYYQLRGEEEEENPTKRIEFCSLKVVEVRADEQQKGKDDTWYSLVLENGWVYRRSSKTPLFDWKDKTRDFIVTTDLNSDGHIKKDKYGIERRSFRAPGPDDWTLLKKKTEQEIERGNKTVGAYIYDSLLLNPCQKIKGKLVRTIERKYYKEELTKILARQIQEHPELKDENLFADCIRELYRNNENHQNTLKGQSFLQLFLNDIIFYQRPLRSQKSSIGNCSLEKRKHKDINGIEYTIPLKAIPKSNPLYQEFRIWKWISDLSIYRRDDEVNVTKQFLLSSESYEKLFEELLSRKEIKQEALMKFLVEQTGLKGKVASMEAGKYRWNYVEDKIYPLNETRATIVSRLAKVEGVSQNFLTKEIEHHLWHIIYSVTDKTEYEKALKRFALKQKIDESSFVENFKKIPPFKPEYVSYSEKAIKRLLPLMRHGKYWKWESIDANSRDRIEKIINGEYDEKISTRVREKTLTLTQTHHFQRLPDWLAKYIVYGRHSEAVDINKWNGVDDLNKYLENFRQHSLRNPIVEQVVTETLRVVKDIWQHYGNGVKDFFDEIHVELGREMKNTAEDRMKITNQITEKENTNLRLKALLVEMMQQGDVENVRPYSPTQLEILKIYEDGVLNSNIEVPDDILKISKTAQPTGKELLKYKLWLEQKYRSPYTGLMIPLNKLFTPAYEIEHIIPQSRYFDDSFGNKVICECAVNRLKDNQLGFEFIKNHRGEKVETGFDNSVTILEEDAYQDFVNAQYAKSRGKRAKLLMEEIPEKMIERQMNDTRYISKFVSNVLSHIVRADKDDDGLNSKNLIPGNGKITSQLKQDWGLNDAWNDLILPRFERMNELTKTEAFTSYSKVHQKCLPTVPLEFSKGFQKKRIDHRHHALDALVIASATRDHVNLLNNQHANSDTKRYDLQRKLRKFEKARYFSKKENRNIERDVPKEFLKPWPTFTSDAKSQLETIIVSFKQNLRVINKATNKYESYKDENGNLRLGKDGKPKKGQIPQTKGDNWAIRKSMHKDTISGKIDLPQVKIAKGKILSATRKKIDSSFDNNIIDSITDTGIQKILKKYLVSKEGNSELAFSPEGLEDLNKNIEMYNEGKPHKPIYKVRIFEQGSKFPLGQTGNKKDKYAEADKGTNLFFAIYWDEEKKKRNYETIPLNEVIEHQKWRAALPKNEQKRTPMIPVKPEKGKFLFSLSPYDLVYMPEIESEVRNVNVNPSRIYKVVSFSGSQCFFIKQEVATSIVNKGEYSALNKMERSIDGKMIKELCIKIEVDRLGRIKRGIT

SEQ ID NO: 23936 - protein, 1148 aa, unidentified
  REGION 1..1148: note = Cas Enzyme sequence
MKKILGLDVGVNSVGFALVELDAQGKESKILKTGVRIVSEDPNFHGNFYSGASASKNLERRQKRSIRRGYKRYQLRKESLYALLSQLGMMPDEDLLERISALELYELRVKSLTLQVSKEELGRIWIALNVKRGFLSNRKSASEEESKSDYLQRIEDLKNAVKDSTIGTYFYKQLVENPYAKLKENIFPRAEYIREFDLIWQSQKTFYPQLLTGGPGEINQGTLYQKVRNEIIYFQRPLKSQKGLISKCRFEKDKRVIPKSHPLFQVFRIWQQINNVEVKDTRNQLYPIDLQTKQKIFEALQNPKSLDAKGYLTEKSILKLLNIKSGLYYLNYDKLEGNKTLLTIYRALKEAEIENPEKFLDFNADVFNEQGGLEQLWHITYSITTEAEVVKALKKYFSFSDTQAQLIAKKVGYTSDFGSLSAKAIRKLMPHLSEGLHYDKACDKVGYKHTTDHEERAYHLPKMRSVKPNELRNPVVEQVLNQVANVVNGLVDEFGKPSEVRLELARELKSNAKKRSRITKLNRELESRNKQIKDNLLQEHQFKRVNGRDLLRYRLWDETERMCLYSGKPIPLADLYNGATEIEHILPKSRSFSNSMSNLIVAYQSENKAKDQMTAYEYMRSKGDKALEIFVSKVNELHQSKKITKAKKDNLLSRGEDIPKDFLDRQKNDTQYIAKEAVSRLKEVFPKVHTTTGSVTDFLREKWELSHVMKEVNLEKYRALGLTEKQTIKDSKGNDKEIEVITDWSKRDDHRHHAVDALIVALTNQSIIQRLNNLNQDYERYKDLKESPLNFPEPIPNLRAKAREELENMLISFKKPNGKVLSKKVNKIKTKQGLKEQVTWVPRGALHEDTIMGKIKRYEKVPLNKKFDRVEDVVSEGLKQVLKTRLEQFNNDPSLAFSNLDRNPILYGGIKVENVVVWDYSFAKRIALSENLTSAQVEKIMDTKVKQLVQDRIAEAGSIKAAFKQYSENPIYLDAARKIPVWRISVFDEGSLQKVRDGYVYLKGNHHAIIYTDGNGNFRDRVVSFWEAVEHAIHNLRTTGSVYPLMDTSPDENGWQVYTTLQINDLFVIGLDPTEVDFFNPVNRKLIAKHTYRVQKLSKGDYNFRHQYETTLERKTDFAFKRIQTLKYFKGIHKVRISGTGNIISVDE

SEQ ID NO: 23937 - protein, 1356 aa, unidentified
  REGION 1..1356: note = Cas Enzyme sequence
MSERQEKIIGLDIGSNSVGWAIVTMQGNELVELHGMGSRILPSNDDTKNFEQGKAQTRNADRRRYRSMRRNNHRYKLRRANLVKVLKLIGAWPEGVGERLSPGDTLLTSKELYELRANAVDKPISLQDLGRVLYHMNQRRGYKDIGELMDELQGKEAPEEEKESNTSIEVRKVVVDTVVVEDAKGKKEILRVRLTDGTEGTTTQPSFKELVGKEVYLQIKTKHTSKGDSISLARVSVSDWLKNKDELDKKIVDSGKHPGQYFYQELLDNPEQPPRFRERVVLRERYKDEFNAIWKRQAAAHPSLTDAQLRDRIIEVLVPKNNGLRAQWANKDLGIILRDFVIYYQRPLKSQTKNKGECRFERKPVMPISSPVYQSFRIWQQVNNIMLRDKYMREQPLNTDQRAVLVQLLMEQGMVTEAGLLRALKLTKSGMETNLRADLPGHLTLGKLRKMLEEHPIWPQLQADAQRVAGMQQTLLFKLWHVLYSIPEQEHRRRAVLQLLDLDEATAEALAKVRFERKHGAVSARAAARITHLMACGPQWNSAEWPASLQRSVQRVIDNRGDDAMKEEMRRAVAHLTSVEQFNGLPYWVAATVAYGDHRAVAGKPIEKPERIRSMPRGFLRNPTVEQVVNEALMVVRDIWKEHGKPDSFRIELARELRQNQQQRENTYKRNGDRERKRKAVVDRLNKEFGKARPTNKDIERFELWEQQKHQCIYSGSHIQASALFSREVDVDHIIPRSLFYDDSMQNKVLCLRRENAGERAKNNQLAGVYMKGKGDAAFDEFVKRITDLELPYGKRKFLLATEVPDSFINRQLNETRYIGTELRKLLERIAPVNTTVGQVTDALKNEWGLTTVYKEVLLPRFERLERIAGRKLIEPLHRTNGADHRDYKIEGFDKRIDHRHHALDALVVALTRQKYIQKIAQLKQRSDALSEEERAGKLTWWPLPHRDIRRIVKDQLERTIPSIKNRQRLFTKATNRTAWYDADAGRVRSGREGKTQQGRLLAVRGKMHEEQPMGEVRRQERMPIDKVMKRLVDVSLFQEVPIMDLVRPIATDDPYYRNRILSHERERAWLEERLAKHNGDTKAALKDWKKDPPRKWSKKAKQEVDVMELTLLVPYYVSTQSIGGLSPKMMTKILDTAVARSLNDHVAAHGDDHEKALTDDGLNALNDGRPVPLKRVRIKKHDTPIWDTDGHRRLERPNSPNQRLHIKMGDNYALAVHVNEATGERSFDIVSFYDAVQRKREGRELIDPKPGHKTFLLRKKDPVYVPRPGELLRDIPWHDQQAIWDRVYTTVKFSGERHYFNHSALSVIAPGFEGKELGSQNCTEFIDTDHPRSKISSSGIPVKVDRLGRVSPLWP

SEQ ID NO: 23938 - protein, 1246 aa, unidentified
  REGION 1..1246: note = Cas Enzyme sequence
MQKIFSLDLGVASIGWAAVLQDPDNEELNEILDCGVRIVPLDSDEIKEFGKGGNVPTNVARRMARGMRRNLQRFKLRRHLLYRALTHLGMMPDERLLRGLPPRELFALRDRALHAPLSLPELGRVLLLLNLRRGFKSNRKAASDKEESAYKEAIKAREADLDAKGQTIGQAFAEGLRQDAHFRVRQKLYNRATYIEEFDLIWAVQAPHHPAVLTEQNRRWLRDKVIYRQRPLKSAKHLVGECALEWNYAVDKRTQQPIVQPNGMKKVVRPKCAPKSSPLAQECKAWESIHNLRVYDEKGQPLLITDEHKRQIFNTLQQEEKNLSATRILKDILKVSPKTYTVDALVKEKGIESNRTRAKLLAVFQATGINRRDLLEFNPAVETVDWDNPDTGERLHRLQLRGDFDQQPLYQLWHLIYATQEEKDLVRLLQERYGFTEAQAEALAQIDFTSAGYASKSHRAMRRLLPHYQRGLDYTDACKTAGYNHSNSLTKAENEGRVLMERLDLNTILPKNSLRNPVVEKILGHMINLVNALLEAYGQPDEIRLELARELRQSAKERQDTTRHIGKREKENKRIRSEIADLLKIQPESVTRAQIEKYRLYEETDGHSIYTGQKTDLAAFLNGDMVDVEHVIPRVRRFDDSFSNKTLCERKLNQDKGNWTAYDFMKAQPVQGLQSFEAYQKMLKTLLDSSKISKTKYRNLMLSAEDLAADKDNFLARQLKETQYITKKAREILLDVSRQVLTTTGGITDFLRHEWGWDEVIQDSRLPQFREIGKTKIVHKHKGTQEKEVIEDWDKRKDHRHHALDALVVACTRRAHIKRINDLNQTLEGTQGQERRDRIRQIGRAKYLAGPAPFTYAQVAEAVEQVLISFKQGQKVASRSKNRPKSNKKPEQITLTPRGSLHEETVYGRLRQYQKVPINTRFDPTWVDEMPHAWQRTLVQARLEQFEGDPKKAFKGIEKKPILYGTGNDRQLKEVTIWRYSLVSRKPVGPLLSEKSVGKIVDPLRAGSRAGALGCRRRDLQRGLQKCGRRPGDPQRAAHPARARAEPRREGRRIAARVCGARQQPPHRNIPRCRGQKARACRHFLGCLPAGAPRPARHHPRRGRGLHPCGGLRRPPPRRHAPARQPGMAVCGVPGHQRHVRVRPRPRRIGLQRPQKPEKGGKMPVQGAKIEFWQLLVFAPFGNRDFGGHHIQKSRQVQAVLHELAHRRGESQAQPPGSRHCFGTGMITKLPPIRPKGFLWINRHDF

SEQ ID NO: 23939 - protein, 1472 aa, unidentified
  REGION 1..1472: note = Cas Enzyme sequence
MTKKILGLDLGTNSIGWALIEQDFENKRGSILGLGTRIIPMSQEIIDTFGQGQSHSQTADRTKARSVRKLYQRDSLRRERLHRVLEILDFLPEHYKSQIDFTTHKGQFINYTEPKLPYSLNESGKYEFLFKNSFNEMLEEFKKSQPELLNSVNRKGEPARIPYDWTIYYLRKKALTQKISKEELAWIILNFNKKRGYYQLSEQDEEYTNDKIKEYVALKVKEVKDSGEKIKGTNNLLYDIFFENGWKYDKQTTKPSDWENKTKEFIVTTSKTKNGEIKRIYKAVNSEEDWIAIKKKTEQDIERSDKTVGTYIYDTLLANPTQKIRGKLVRTIERKFYKEELRMILDKQLKEHSEFSDQALYATCIQELYPHNENHRKGIENRNFRYLLMDDIIFYQRPLKSKTHLIGNCQLEYRIRKDNKERIPVKCIAKSNPFFQEFRLWQFLSNLKLYELEKEENGKTVFDVNVTSLYLSTEEKWIELFEWLNNKDTISQKQLLSFFKLKEEKYRWNYIEDKEYPCNETRAKFLIRLKKTDNKDFTLTSEITQHLWHILYSVTDPEQRKSAIEKFAKKHGLNQAFSDSFIKFPPYKRDYGSFSEKAIKKLLPLMRNGKYWNWNNINCETQKRIDKLITGEYDERIKSLVREKAISLSEKNHFKALPLWLASYVVYDKHAEASDTKKWETSAEIAYFLKHEFKQHSLRNPIVEQVLTETLRVVGDIWDEFGNGEKNFFDEIHIELGREMKNDKRTRERITSQVKENENTNLRIKALLNELKESGTDIRPHSPSQQEILKIYEEGVYLSESRKDQLDEIEKIRKNNSPSKMEIQRYRLWLEQGYISPYTGKAIGLTELFSHKYQIEHIFPQSRYFNDSLSNKVICEAEINQLKDNRTAYEFIKEFGGNIVSLGEGLTAKIHTLSDYENHVKTYFSKSKIKRENLLSVDIPESFINRQMNDSRYISKIVKNLLSKIVRDEDEKEVISKYIIPVSGMITSQMKNDWGLNDVWNDIIAPRFERMNALTRSQDFGAINPNTNKFLPNVPPSLSKGFSKKRIDHRHHALDALIIACITREHVNYITSINTERKNYSLVNKLRYIEEIEKVIKKSDGTQVLEKRKVAKDFYKPWQTFTQDVRQKLETTIVSFKQNTRVINKAKNKYQKFIEDENGKLTKKLVPQIKGENWAIRKPLHKDTIYGKVFLKRNGKIIEATAGRVELSEKFTRKHLESITDTGIQKIFENHIKNYLDDKGKEQFDLAFNPEGVDKLNENIIILNNGVFHQPIRKVRIYEEGNRFAVGQNGNKKDKYVEAAKGTNLFFAVYIGKNKKEELVRQYSTIPLNEVIESLKQGGKPAPDKYYDKDKNEYSILFTLSPNDLVYVPTVEEKQNSLKIDFTNLTKEQLNRIYRFTDSSDTTANFIPFNVSNLLFNIPKKEQEKRGINFHIQNEFGLGSPQSKNQKSIDDIMIKECCIKLKVDRLGNISKA

SEQ ID NO: 23940 - protein, 1448 aa, unidentified
  REGION 1..1448: note = Cas Enzyme sequence
MKKIGFDLGSSSVGWFLRDGENVLKFGAVVFNSGMQKGTSGYSSPTKDRREYRLKRNPIKARKYRKKLMLKTLLENNMVPLKRFELKEWTNYAKGKKKKFPDNPEFKKWLACDFSFNDGKTYKNPYELRVKSLDEQLTKLELGRSLYHLAQRRGFKDIGEKNEETKKQIERRKESGFQSALSNHRTIAEALQKEYLEKNCRARDNYPYRDEYEDELKQILIKQGYSVDQNDQGQFVDPFVKAVRKAIIWQQPLKTQKESIGKCTFEPKKRRCALSHPLFEISRAWQFINTIKYKEVLNDDYQFISQEQRNIIFSTVFLRESTNFKFEKIRNKLDRLFQKKMFYNYRLDTKIDTYESTVAGMPFCKGVIKIFGDQAKTDLDSIEQYNQGNMPKNYNGYSLLDIWHNVTEFDAENLSEFGTQKLNLPLRERKRKREIETFSPLVDLKETLPKGYGNLSQFVLKKTIPLLKNGYLYNDAVLLANLKDALGNKYEEQKNKVSTILNEVGLNYNEDKIITRITNHLIEIYKGKEEANRNGEENELFAQGDFNYVLQDSDTKDVIDACKNHFGENKWESKRNKEELINKVGKEYQEFFFDLRRYFRGLKSIQERFEDALHEEGIELKKPLYHHSKLANIYGDTIQYRDTDIEILPLAKTNSIKNPMFNKALSILRKVVNQLIVDGIIDQETEVTIEIARELNDNNKRIAIERFQKQREAKRNKIRTFLEEFKSQEKSSLNVEESIQQFELWDEQIFEETEDENGLKRKNSDRNEILKEKNSIKRYELWMEQQGQCMYTGKMISINQLFSAATEIEHTIARKLLPDNTLANETIAFKLYNTNIKKTLLPVYLPNFSKDVSGTGTAIEPRLLQWQRIRDKFRYRYQINQKASGNEDEKSKNERIQNKHFNKMHFDYWNDKLERFTETDVTDRWARRQLTDTQNISKYAREFLKTYFHKVGVQKGSTTAEFRKMLGLEDSDNPKDRSLHTHHIIDASVLTYIPTNASRRDRLIKMSYKSKDEFKKQFHYSPHANFNVQRIKRMIENETLIFNYTKDNVTTQTFKKVRKSGRIVAKKDENGDKIILSKNGENIQYDPVISRGDTIRTSLFADSFLGKIKDVERYDDGIPKRNIDGSDWEYKKGDDEFLFVKRDPIDKINRSNLKDIVDPALAKLIESQLGQETILDWQGNKIRHVRLKKRSGRKVKSRVDYKSEKDYKNYYYAESGSIPYGVMALNPTSNERFLLQVHAYQISKIFNEYRNFDIEAFVQEYYPELTTFKKLLLRVGQKLIVFNNDEEYSERKDKTFQRNRLYKITKIDNGSLWLKYHLTATADNNLDLIVKEKKDEILWQHEKGLGLSKVTVDESIEDMKERNDDFERRKFKVTSYTDYRLKRIVENFGREKASEIKSELSIYKKVSSSIEVEGETHLLKLNTSNSWNFLYEGEDFKLSILGDIKIIE

SEQ ID NO: 23941 - protein, 1197 aa, unidentified
  REGION 1..1197: note = Cas Enzyme sequence
LTEALFLELKDKNSGQTWTICSKPFEIQGKYLKGSKDEQRLLKYQFRKEGLEKQLNLEQLAVAIQEINNDISGTSGYLGKISDRSKILITDKITVGRYMSDQIKKNPHTLLKNQVFYRQDYLDEFEQIWNTQAVFHQQLSNKLKSEIRDVVIFYQRPLKSQKGLLSHCIFESWEQEYYDKIKGKTRKRTVGHRVIPKSSPLFQQFKIWQNINDLEFKYIGKNIDGLKKENIHIDKKLVTLKIDQEDRNLLFKEANSKANSKGYISSTEVLKLLGLSSRDWKCNFKEGINANTTNQKLLEVYQAIAQREGYGHDWSKKTTVEMWEELNVVFNDIGIDNSILNFDPLIKANAYSKQKSLELWHLLYSTEDGGKVQEDDQLIYGNQDVALRKQLHLKYGFKPEYAKTLSNLSFPNDYGSLSSRAIRKIMPHLIEGHDYYEACDRAGYNHSNSLNKEENDNRKLADHLELVGKNSLRNPVVEKILNQVVNLVNQVIDTYGKPDEIRIELARELKKSTEERKQMTQYINTATKLNLDIAQTIQKDFGFIPTKSDVVKYKLWEELSARGYKSLFSNTYIAKEDLFSKKIEIEHIIPKALVYDDSFSNKTLAYREVNLKKANRTAMDFISQDKSKDIEVYKERVEALYDKGKGAITKAKRDKLLKVAGDINEGFIERDLRNSQYIAKKSRTLLEKVCRTVTPTTGMITDKLREEWGIINVLKELNLDKYRALGLVEMEQRKHGKEVEKIKDWTKRNDHRHHAMDALAVAFTTVSHIQYINNLNARRNTLHEKHKVILGIENKITEIVLNKNGKNKRVYKKPFPNFRSQAKKNLENILISFKAKNKVVTNNINKTKKEGGYNRTRSLTPRGQLHKETIYGKSLTPESKVTKLNKRFAFAKAEHIIDQKQKIIVLEHLKKYNDNPEIAFDTKTLKTDPLLWHDKPLTEVLCYKEIYTIRKDVAPDLKIDKVIDNGTREILKKRLKEYRNNAKEAFSNLESFPIWQNEEKGIKIKKVTITGVANAEPLHTAKDHLGNTLIDVNNNKIPVDYVSLGNNHHVAIYKDSDNKLQEKVVSLYEAVTRSNQGLPIIDKTYNQELGWEFLFTMKQNEMFIFPSDDFDPKEIDLMDEKNARFISTHLYRVQKISTKNYLFTHHYETSAINSDDLKNKKMLSKISYNFIQSTELLRGIIKIRINHIGQIVHVGEY

SEQ ID NO: 23942 - protein, 1527 aa, unidentified
  REGION 1..1527: note = Cas Enzyme sequence
MKKILGLDLGTNSIGWSLIKHDFKNKQGQIEGLGVRIIPMSQEILGKFDVGVTESQTAKRTEYRGVRRLLQRNLLRRERLHRVLNIMNFLPKHYAKEIDFKRHLGQFKDEIKLNYHKNEQGKHEFIFMNSFNEMAKEFQTNGLNTKIPLDWTLYYLRKKGLSQKITKEELAWIILNFNQKRGYYQLRGEEEENQDKNEEFYTLKVVEVKETDDKKKDSSIWYNVILENGWVYKRSSKIPLFDWLDKTKEFIVTTSLEKDGTEKKDRNGEIKRSFRAVDSEKDWLAIKKKTEQDIEKSSKTVGQYIYETLLKNPSQKIRGKLVKTIERKFYKEELIAILSEQKNHHSELRNKFIYQACVEELYPRNEAHQKNIINNDFAYLLVEDVIFYQRPLKSKKSTISNCPYESRFFIKDGKKEVQPIKCISRSNPIFQEFRLWQFIKNLKIYQRGITINNIPEIDYPVTEQFLKTQTEIIELYDFLNDKREIDQKQLLKHFKLSEKAHRWNYVEDKKYPCNDTRGSFLSRLSRVENIDPEKFLNKKTEHKLWHIIYSVKDKKEFEIALKSFAVKNNIHESSFVENFRKFPPFKNEYGSYSEKAIKKLLTLMRIDKYWDEEKIENTTKNRIQSIIERLGSIAFDKEKIDTITDDDIPKQVLKSFIVSRASPFSGLNTYQACYAVYNRHSEVSEITKWKTPNDIAKFLYEFKQHSLRNPIVEQVVTETLRVVKDIWEFHGEGCEDFFSEIHIELGREMKNPAEKRKQLTQRNSENQNTNQRIKALLHELKNDINVKSEVKPYSPSQQEILKIYEEGVFQNSPEEYKSIKIDEVEKIRSNNSPSRSEIIKYKLWLEQGYISPYTGKPIPLSKLFSTEYQIEHIIPQSRYFDNSLNNKIICESEINELKDNKTAFVFITEENGRIVELTENKKAKLFTIEEYKNHCNNYFKKNRSKLKNLLSEDIPEGFINRQLNDSRYISKLIKGLLSNIVREENEEEATSKHLVPVNGAITSQLKNDWGLNDKWNEIVAPRFIRLNELTNSQDFGFWDKTINAFRTQVPDEIARGFNKKRIDHRHHALDALVIACTTKDHISYITSLNTQRKNYGLIDKLRVRKEIQIKNKYNGDTIIKKIASDYHKPWPNFTINAREALVHTLISFKQNTRVITKANNKTWQWVHKNGILKKGLVVQTKGDNRAIRKPLHKETVYGKVIIKREKGIVSIAHALENWEMIVDSTVKEIIKEKVKFYKTDKKLLKKYFKDTPITIEGEKIDKVMVYEKVEATASRVALTEKLTRKQLESITDSGIQMILENHIKNYIDTKGKEHFELAFNPDGIDKLNKNIVQLNNGKFHHPIYKVRLYEVGNKFPVGYTRNKKDKYVEAAKGTNLFFAIYQDTESKKRSYETIPLNIVIERKKQGLNVAPEKDVNNNILLFTLSPNDLVYLPKEEEQEDLDLLNIKKLTKEQLERIYRVEKASGKECYFIQNNISKLIKQYDPKSKFGEFGSQNKLQIGLNGQKISEVCWKLKVDRLGNIKKVINY

SEQ ID NO: 23943 - protein, 1550 aa, unidentified
  REGION 1..1550: note = Cas Enzyme sequence
MKRILGLDLGTNSIGWALTNNDFDNKLGNIEGLGSRIIPMSQEVLGKFDSGVSISQTAQRTEHRGKRRLVQRFLLRRERLHRVLNILGFLPSHYSEAIDFNKKFGQFKPEREEKLFFYKNESNKNQFLFLESHQEMLAEFKLLYSDLKAVPYDWTIYYLRKKALTQKISKEELAWILLNFNQKRGYYQLRGEEKEENKNKLEEFHTLTIVNVIEREKGKSGIWYNLVLENGWIYKRESKIALFDWVGKKRDFIVTTELNDDGTIKLNKDKEEKRSFRSPKDDDWGLVKIKTEQTINQSGKSVGTFIYDNLLKNPNQKIKGELVRTIERHYYKNELKQILETQIEYHAATLENRGIYKKCIDELYKHNDSHKINIKNRGFDYLFLDDIIFYQRPLKSKTSLISDCSLEFRPIKDAKGVLVKDVNGIQIVKPLKCIAKSNPIFQEFRLLQFLKNLKIFRKEIASEIDVTSDYLKTEDDLVELFNWLNDKAEISQKQFLAYPKFKLKKDKFRWNFVEEKIYPCNETRNQFLNAIAKIDVDKSFFDTKNTQDLWHILYSVTDKTEITKAITTFVKRHSLPEEFIVNFSKLKPYKKDYGSYSEKAIKKLLPLMRFGNHWNEENIDLKTLARIDKIQTGEFDENIKNRVQEKAIHLNVLSDFKSLPLWLASYIVYDRHSESSDVSKWKTPSDIEHFLKHDFKQHSLRNPIVEQVITETLRVVKDIWQYYGEGKENFFNEIHVELGREMKNNAADRKRITDNISQNENTNLRIKAILTELKNDGINDIRPYSPSQQEILKIYEEGIYSSENRKEKLEEVDNFRKNAKPTTAEINKYKLWLEQGYISPYTGKLIPLSDLFTTKYQIEHIIPQSRLFDDSLSNKVICESEVNDLKGNKTALEFILKNEDRIITLTGGKTVKIFTKDAYNQHITSYYSKNKNKQKRLLSEDIPEKFIDRQLNDTKYISKIVKNLLSKIVREDDEQEVTSKHIVSLNGSITSKMKQDWGLNDVWNKIITPRFERLNAITNSSDFGKLEFKKDEFGNTGKQVFQTAVPDAIAKGFSKKRIDHRHHALDALVIACVNRTHINYLNNLNAKDENDKTIKHELRNKLCFKTKPDANGNYKWEFHKPWGNFTKNTEDELNKTIISFKQNTRVINKTVNNYQVWKEEDGVMKKVTVKQIKGDNWAIRKPLHAETVSGKVFLKRIKQSHITISNAIEQIELIVDKEVKKQLKEKIKQYPDNVEGLKKHLKAFPVMIDGKFIDKVQIYENLEATATRKTLDITFDEKRIEKITDTGIRKILLTHLQQEIYQNAIDENGKKIPANEVAFSENGLDELNKNITASNNGKQHQPIKKVRVFEESGRFFLGNTGNNSTKFVETASGTNLFFAIYKNNDGKRNFKTIPLNEVIESQKLGAFEKLKPAECSVPKIRIDEKTKELSYLLFYLNPDDLVFVPIIEEIENPNIVDVQNFTKGQTQRIYKFTDSSNTTCNFIPASSSSLIFSLTKKDQVKIGVNFPIQNEYGLGSPQSKNQNSLAGIQIKSVCWKIEVDRLGKIKNIIR

SEQ ID NO: 23944 - protein, 1429 aa, unidentified
  REGION 1..1429: note = Cas Enzyme sequence
MKNILGLDLGTTSIGFAHVIESDDPLKSIIKQIGVRVNPLTTDEQTNFEKGKPITINADRTLKRGARRNLDRYQDRRANLIHALFKANIITKETKLAEDGKSTTHSTWRLRAQSVTEKIEKDDLARVLLAINKKRGYKSSRKAKNEDEGQAIDGMEMAKKLYEEKLTPGQFAYALLQAGKKNISDFYRSDLEEELDKVWAFQKNYYPEIFTDEFKKELEGKGQRATSAIFWVKYRFNTAENKGTREEKKVQAYKWRSEAISQQLEKEEVAYVITEINNNLNNSSGYLGAISDRSKELYFNKETVGQYLFKQLLKNPHTQLKNRVFYRQDYLDEFELIWSEQKKHHSELTDELKVEIRDIVIFYQRKLKSQKGLVSFCEFERKEIEIETGKKKIIGLKVAPKSSPLFQEFKIWQVLHNVLIKKKESKKRMEKKENQSSLVESEKEIFAFSLEERKHLFEELNLKGNLPSKTVFELLGHKIQDWEINYSVFEGNRTNKALYEAYLKILDIEGYDVKELLEVKSNKDEVELDDIQIAASEIKNMIKQIFEILKIDTAILDFDPELDGKEFEQQASYQFWHLLYSYEGDESASGNEKLYELLEKKFGFKREHSQILADVTLSDDYGNLSSKAIRKIYPYIKENNYSTACELAEYSHSASSLTKEEIANRPLKDKLEILKKNSLRNPVVEKILNQLVNVVNALIEKNSKRDESGNIVEYFKFDEIRIELARDLKKNAKERAEMTSSINTAKTNHEKIFKLLQNEFGVKNPSRNDIIRYRLYEELKNNGYKDLYTNSYISREILFSKQIDIDHIIPQAKLFDDSFSNKTVVFRKDNLEKGSKTAYDYISAKHGATQLADFETRIASLFEIGKKNKEEGISKAKYQKLQKKESQIGDGFIQRDLRDTQYIAKKAKNMLFEIARSVISTTGSVTNRLREDWDLINVMQELNFDKFKKLGLTEMVEKKDGTFKERIKDWSKRNDHRHHAMDALTVAFTRHNHIQYLNNLNARKQESNKLHRNIIGIETKETHVAIDDTGNKKRVFNLPIPNFREQAKAHLENVLVSHKAKNKVVTKNKNRTKLKTGEKIKVELTPRGQLHKETVYGKYRYYTSKVEKVGIKFDLPIIGRVANPRYKQALLNRLSESGNDPLKAFSGKNSPSKKPIYLNDEKTAILPEKVKLVWLEEDYSIRKDVTPENFKDEKSIEKVIDIGTKRILLGRLAEFGGDSKKAFSELDKKPIWLNKDKGISIKRVAISGVKNAEALHYKKDHLGNEILDKRGNQIPVDFVSTGNNHHVAIYINDKGEIQENVVALFEALERVNQGLPIIDKTYNQYLGWVFLFTMKQNEYFVFANTSTGFNPKEVDLLDSKNMLAISPNLFRVQKFTKKDYFFRHHFETTVEDNSNLKGTTWKREGLSGINGIVKVRLNHLGEIVKVGEY

SEQ ID NO: 23945 - protein, 1387 aa, unidentified
  REGION 1..1387: note = Cas Enzyme sequence
NGLNTKIPLDWTLYYLRKKGLSQKITKEELAWIILNFNQKRGYYQLRGEEEENQDKNEEFYTLKVVEVKETDDKKKDSSIWYNVILENGWVYKRSSKIPLFDWLDKTKEFIVTTSLEKDGTEKKDRNGEIKRSFRAVDSEKDWLAIKKKTEQDIEKSSKTVGQYIYETLLKNPSQKIRGKLVKTIERKFYKEELIAILSEQKNHHSELRNKFIYQACVEELYPRNEAHQKNIINNDFAYLLVEDVIFYQRPLKSKKSTISNCPYESRFFIKDGKKEVQPIKCISRSNPIFQEFRLWQFIKNLKIYQRGITINNIPEIDYPVTEQFLKTQTEIIELYDFLNDKREIDQKQLLKHFKLSEKAHRWNYVEDKKYPCNDTRGSFLSRLSRVENIDPEKFLNKKTEHKLWHIIYSVKDKKEFEIALKSFAVKNNIHESSFVENFRKFPPFKNEYGSYSEKAIKKLLTLMRIDKYWDEEKIENTTKNRIQSIIERLGSIAFDKEKIDTITDDDIPKQVLKSFIVSRASPFSGLNTYQACYAVYNRHSEVSEITKWKTPNDIAKFLYEFKQHSLRNPIVEQVVTETLRVVKDIWEFHGEGCEDFFSEIHIELGREMKNPAEKRKQLTQRNSENQNTNQRIKALLHELKNDINVKSEVKPYSPSQQEILKIYEEGVFQNSPEEYKSIKIDEVEKIRSNNSPSRSEIIKYKLWLEQGYISPYTGKPIPLSKLFSTEYQIEHIIPQSRYFDNSLNNKIICESEINELKDNKTAFVFITEENGRIVELTENKKAKLFTIEEYKNHCNNYFKKNRSKLKNLLSEDIPEGFINRQLNDSRYISKLIKGLLSNIVREENEEEATSKHLVPVNGAITSQLKNDWGLNDKWNEIVAPRFIRLNELTNSQDFGFWDKTINAFRTQVPDEIARGFNKKRIDHRHHALDALVIACTTKDHISYITSLNTQRKNYGLIDKLRVRKEIQIKNKYNGDTIIKKIASDYHKPWPNFTINAREALVHTLISFKQNTRVITKANNKTWQWVHKNGILKKGLVVQTKGDNRAIRKPLHKETVYGKVIIKREKGIVSIAHALENWEMIVDSTVKEIIKEKVKFYKTDKKLLKKYFKDTPITIEGEKIDKVMVYEKVEATASRVALTEKLTRKQLESITDSGIQMILENHIKNYIDTKGKEHFELAFNPDGIDKLNKNIVQLNNGKFHHPIYKVRLYEVGNKFPVGYTRNKKDKYVEAAKGTNLFFAIYQDTESKKRSYETIPLNIVIERKKQGLNVAPEKDVNNNILLFTLSPNDLVYLPKEEEQEDLDLLNIKKLTKEQLERIYRVEKASGKECYFIQNNISKLIKQYDPKSKFGEFGSQNKLQIGLNGQKISEVCWKLKVDRLGNIKKVINY

SEQ ID NO: 23946 - protein, 1429 aa, unidentified
  REGION 1..1429: note = Cas Enzyme sequence
MKNILGLDLGTTSIGFAHVIESDDPLKSIIKQLGVRVNPLTTDEQTNFEKGKPITINADRTLKRGARRNLDRYQDRRANLIHALFKANIITKETKLAEDGKSTTHSTWRLRAQSVTEKIEKDDLARVLLAINKKRGYKSSRKAKNEDEGQAIDGMEMAKKLYEEKLTPGQFAYALLQAGKKNISDFYRSDLKEELGKVWAFQKNYYPEIFTDEFKKELEGKGQRATSAIFWVKYRFNTAENKGTREGKKVQAYKWRSEAISQQLEKEEVAYVITEINNNLNNSSGYLGAISDRSKELYFNKETVGQYLFKQLLKNPHTQLKNRVFYRQDYLDEFELIWSEQKKHHSELTDELKVEIRDIVIFYQRKLKSQKGLVSFCEFERKEIEIETGKKKIIGLKVAPKSSPLFQEFKIWQVLHNVLIKKKESKKRMEKKENQSSLVESEKEIFAFSLEERKHLFEELNLKGNLPSKTVFELLGHKIQDWEINYSVFEGNRTNKALYEAYLKILDIEGYDVKELLEVKSNKDEVELDDIQIAASEIKNMIKQIFEILKIDTAILDFDPELDGKEFEQQASYQFWHLLYSYEGDESASGNEKLYELLEKKFGFKREHSQILADVTLSDDYGNLSSKAIRKIYPYIKENNYSTACELAEYSHSASSLTKEEIANRPLKDKLEILKKNSLRNPVVEKILNQLVNVVNALIEKNSKRDESGNIVEYFKFDEIRIELARDLKKNAKERAEMTSSINTAKTNHEKIFKLLQNEFGVKNPSRNDIIRYRLYEELKNNGYKDLYTNSYISREILFSKQIDIDHIIPQAKLFDDSFSNKTVVFRKDNLEKGSKTAYDYISAKHGATQLADFETRIASLFEIGKKNKEEGISKAKYQKLQKKESQIGDGFIQRDLRDTQYIAKKAKNMLFEIARSVISTTGSVTNRLREDWDLINVMQELNFDKFKKLGLTEMVEKKDGTFKERIKDWSKRNDHRHHAMDALTVAFTRHNHIQYLNNLNARKQESNKLHRNIIGIETKETHVAIDDTGNKKRVFNLPIPNFREQAKAHLENVLVSHKAKNKVVTKNKNRTKLKTGEKIKVELTPRGQLHKETVYGKYRYYTSKVEKVGIKFDLPIIGRVANPRYKQALLNRLSESGNDPLKAFSGKNSPSKKPIYLNDEKTAILPEKVKLVWLEEDYSIRKDVTPENFKDEKSIEKVIDIGTKRILLGRLAEFGGDSKKAFSELDKKPIWLNKDKGISIKRVAISGVKNAEALHYKKDHLGNEILDKRGNQIPVDFVSTGNNHHVAIYINDKGEIQENVVALFEALERVNQGLPIIDKTYNQYLGWVFLFTMKQNEYFVFANTSTGFNPKEVDLLDSKNMLAISPNLFRVQKFTKKDYFFRHHFETTVEDNSNLKGTTWKREGLSGINGIVKVRLNHLGEIVKVGEY

SEQ ID NO: 23947 - protein, 1429 aa, unidentified
  REGION 1..1429: note = Cas Enzyme sequence
MKNILGLDLGTTSIGFAHVIESDDPLKSIIKQIGVRVNPLTTDEQTNFEKGKPITINADRTLKRGARRNLDRYQDRRANLIHALFKANIITKETKLAEDGKSTTHSTWRLRAQSVTEKIEKDDLARVLLAINKKRGYKSSRKAKNEDEGQAIDGMEMAKKLYEEKLTPGQFAYALLQAGKKNISDFYRSDLEEELDKVWAFQKNYYPEIFTDEFKKELEGKGQRATSAIFWVKYRFNTAENKGTREEKKVQAYKWRSEAISQQLEKEEVAYVITEINNNLNNSSGYLGAISDRSKELYFNKQTVGQYLFKQLLKNPHTQLKNQVFYRQDYLDEFELIWSEQKKYHPELTDEPKVEIRDIVIFYQRKLKSQKGLVSFCEFERKEIEIETGKKKIIGLKVAPKSSPLFQEFKIWQVLHNVLIKKKESKKRMEKKENQSSLVESEKEIFAFSLEERKHLFEELNLKGNLPSKTVFELLGHKIQDWEINYSVFEGNRTNKALYEAYLKILDIEGYDVKELLEVKSNKDEVELDDIQIAASEIKNMIKQIFEILKIDTAILDFDPELDGKEFEQQASYQFWHLLYSYEGDESASGNEKLYELLEKKFGFKREHSQILADVTLSDDYGNLSSKAIRKIYPYIKENNYSTACELAEYSHSASSLTKEEIANRPLKDKLEILKKNSLRNPVVEKILNQLVNVVNALIEKNSKRDESGNIVEYFKFDEIRIELARDLKKNAKERAEMTSSINTAKTNHEKIFKLLQNEFGVKNPSRNDIIRYRLYEELKNNGYKDLYTNSYISREILFSKQIDIDHIIPQAKLFDDSFSNKTVVFRKDNLEKGSKTAYDYISAKHGATQLADFETRIASLFEIGKKNKEEGISKAKYQKLQKKESQIGDGFIQRDLRDTQYIAKKAKNMLFEIARSVISTTGSVTNRLREDWDLINVMQELNFDKFKKLGLTEMVEKKDGTFKERIKDWSKRNDHRHHAMDALTVAFTRHNHIQYLNNLNARKQESNKLHRNIIGIETKETHVAIDDTGNKKRVFNLPIPNFREQAKAHLENVLVSHKAKNKVVTKNKNRTKLKTGEKIKVELTPRGQLHKETVYGKYRYYTSKVEKVGIKFDLPIIGRVANPRYKQALLNRLSESGNDPLKAFSGKNSPSKKPIYLNDEKTAILPEKVKLVWLEEDYSIRKDVTPENFKDEKSIEKVIDIGTKRILLGRLAEFGGDSKKAFSELDKKPIWLNKDKGISIKRVAISGVKNAEALHYKKDHLGNEILDKRGNQIPVDFVSTGNNHHVAIYINDKGEIQENVVALFEALERVNQGLPIIDKTYNQYLGWVFLFTMKQNEYFVFANTSTGFNPKEVDLLDSKNMLAISPNLFRVQKFTKKDYFFRHHFETTVEDNSNLKGTTWKREGLSGINGIVKVRLNHLGEIVKVGEY

SEQ ID NO: 23948 - protein, 970 aa, unidentified
  REGION 1..970: note = Cas Enzyme sequence
LNLKGNLPSKTVFELLGHKIQDWEINYSVFEGNRTNKALYEAYLKILDIEGYDVKELLEVKSNKDEVELDDIQIAASEIKNMIKQIFEILKIDTAILDFDPELDGKEFEQQASYQFWHLLYSYEGDESASGNEKLYELLEKKFGFKREHSQILADVTLSDDYGNLSSKAIRKIYPYIKENNYSTACELAEYSHSASSLTKEEIANRPLKDKLEILKKNSLRNPVVEKILNQLVNVVNALIEKNSKRDESGNIVEYFKFDEIRIELARDLKKNAKERAEMTSSINTAKTNHEKIFKLLQNEFGVKNPSRNDIIRYRLYEELKNNGYKDLYTNSYISREILFSKQIDIDHIIPQAKLFDDSFSNKTVVFRKDNLEKGSKTAYDYISAKHGATQLADFETRIASLFEIGKKNKEEGISKAKYQKLQKKESQIGDGFIQRDLRDTQYIAKKAKNMLFEIARSVISTSGSVTNRLREDWDLINVMQELNFDKFKKLGLTEMVEKKDGTFKERIKDWSKRNDHRHHAMDALTVAFTRHNHIQYLNNLNARKQESNKLHRNIIGIETKETHVAIDDTGNKKRVFNLPIPNFREQAKAHLENVLVSHKAKNKVVTKNKNRTKLKTGEKIKVELTPRGQLHKETVYGKYRYYTSKVEKVGIKFDLPIIGRVANPRYKQALLNRLSESGNDPLKAFSGKNSPSKKPIYLNDEKTAILPEKVKLVWLEEDYSIRKDVTPENFKDEKSIEKVIDIGTKRILLGRLAEFGGDSKKAFSELDKKPIWLNKDKGISIKRVAISGVKNAEALHYKKDHLGNEILDKRGNQIPVDFVSTGNNHHVAIYINDKGEIQENVVALFEALERVNQGLPIIDKTYNQYLGWVFLFTMKQNEYFVFANTSTGFNPKEVDLLDSKNMLAISPNLFRVQKFTKKDYFFRHHFETTVEDNSNLKGTTWKREGLSGINGIVKVRLNHLGEIVKVGEY

SEQ ID NO: 23949 - protein, 1432 aa, unidentified
  REGION 1..1432: note = Cas Enzyme sequence
MRNILGLDLGTTSIGFAHVIESEDSLKSIIKQIGVRVNPLTTDEQTNFEKGKPITINADRTLKRGARRNLDRYQDRRANLIHALFKANIITKETKLAEDGKSTTHSTWRLRAQSATEKIGKDDLARVLLAINKKRGYKSSRKAKNEDEGQAIDGMEVAKRLYEEMLTPGQFAYKMLQEGKKNIPDFYRSDLQNELDKVWAFQKKYYLDIFTDEFKKELEGKGQRATSAIFWVKYQFNTAENKGTREEKKVQAYKWRGEALSQQLEKEEVAYVITDINNNLNNSSGYLGAISDRSKELYFNRETVGQYLFNQLLKSPHTRLKSQVFYRQDYLDEFEAIWSEQKKHHPELTDELKIEIRDIVIFYQRKLKSQKGLVSFCEFESREIEIENGKKKTIGLKVTPKSSPLFQEFKIWLVLHNVLIKKKGSKKRIAKNEKQVSLFEVEKEIFPFDEDEKKHLFHELNIKGNLSAKTVLELLGYKSQDWEINYTVLEGNRTNKALYEAYLKILDIEGYDVKGLLEVKSNKDEVELDDIQIAASEIKNMIKQIFETLKIDAAILDFDSELDGKAFEEQLSYQLWHLLYSYEGDESASGNEKLYELLEKKFGFKRAHSQVLANVTLSDDYGNLSSKAIRKIYPFIQENDYSTACELAGYRHSASSLTKEEISNRPLKDKLEILKKNSLRNPVVEKILNQMVNVVNALIEKNSKKDENGDIVAYFKFDEIRIELARDLKKNAKERAEMTSSINAAKFNHDKIFKLLQNEFGVKNPSRNDIIRYRLYEELKSNGYKDLYTDSYISREILFSKQIDIEHIIPQSKLFDDSFSNKTVVFRKDNLEKGNKTAYDYLESKFGEKGLEDFESRISSLFDLNKRNKDEGISRAKYQKLLKKETEIGDGFIERDLRDSQYIAKKAKNILYEISRSVLSTTGSVTNKLREDWDLINIMQELNFEKFKKLGLTEMVEKKDGTFKERIKDWSKRNDHRHHAMDALTVAFTRHNHIQYLNNLNARKNESKKLHNNIIGIETKETHLSIDDRGNKKRIFNLPIPNFREQAKEHLENVLVSHKAKNKVVTKNKNKTKSGKGEKVKVELTPRGKLHDQTVYGYRSWSRIELSKKVSRKEIESIIDRGLQKFLLEHIGKNGSISKAFSDEQLKKLQYRGKSLLEIEVSIPCYTQRIDISKVFTDSQKTDSAKSKSIKSILDLGVRKILNQRLKDFNFDFKKAFSDLDRNPIWLNKEKGISIRRVTISGTKNAEPLHFKKNHFGIDILDNGGSKILVDFVSKGSNHHLAVYRDENGNLQDDIVSFFDAVELGKSGESIVNKYFNQGLGWQFLFSMKQNEYFVFPNEKQEFYPIEIDLLNPENAKIISPNLFRVQKISKVSYGNSAVRDYVFRHHLETTVDDKKELKEIAFKSIKSLGYFENVVKVRLNHLGEIIKVGEY

SEQ ID NO: 23950 - protein, 1407 aa, unidentified
  REGION 1..1407: note = Cas Enzyme sequence
MKRILGLDLGTTSIGWALVNESENDKEESSIVKAGVRVNPLTVDEKINFEGGKPISTNADRTLKRGARRNLDRYQLRRDNLIQILKDNNFIDKNTPLTEIGKNTTHQTLFLRAKAAKERIELEDLSKVLLAINKKRGYKSSRKTKEESDGVAIDGMAVAKILYENDLTPGEYVFDLLKNKKKYIPDFYPSDLKAELLAIWRNQKQYYPELLTEALFLELKDKNSGQTWTICSKPFEIQGKYLKGSKDEQRLLKYQFRKEGLEKQLNLEQLAVAIQEINNDISGTSGYLGKISDRSKILITDKITVGRYMSDQIKKNPHTLLKNQVFYRQDYLDEFEQIWNTQAVFHQQLSNKLKSEIRDVVIFYQRPLKSQKGLLSHCIFESWEQEYYDKIKGKTRKRTVGHRVIPKSSPLFQQFKIWQNINDLEFKYIGKNIDGLKKENIHIDKKLVTLKIDQEDRNLLFKEANSKANSKGYISSTEVLKLLGLSSRDWKCNFKEGINANTTNQKLLGVYQAIAQREGYGHDWSKKTTVEMWEELNVVFNDIGIDNSILNFDPLIKANAYSKQKSLELWHLLYSTEDGGKVQEDDQLIYGNQDVVLRKKLHLKYGFKPEYAKILSNLSFPNDYGSLSSRAIRKIMPHLIEGHDYYEACDRAGYNHSNSLNREENDNRKLADHLELVGKNSLRNPVVEKILNQVVNLVNQVIDTYGKPDEIRIELARELKKSTEERKQMTQYINTATKLNLDIAQTIQKDFGFIPTKSDVVKYKLWEELSARGYKSLFSNTYIAKEDLFSKKIEIEHIIPKALVYDDSFSNKTLAYREVNLKKANRTAMDFISQDKSKDIEVYKERVEALYDKGKGAITKAKRDKLLKVAGDINEGFIERDLRNSQYIAKKSRTLLEKVCRTVTPTTGMITDKLREEWGIINVLKELNLDKYRALGLVEMEQRKHGKEVEKIKDWTKRNDHRHHAMDALAVAFTTVSHIQYINNLNARRNTLHEKHKVILGIENKITEIVLNKNGKNKRVYKKPFPNFRSQAKKNLENILISFKAKNKVVTNNINKTKKEGGYNRTRSLTPRGQLHKETIYGKSLTPESKVTKLNKRFAFAKAEHIIDQKQKIIVLEHLKKYNDNPEIAFDTKTLKTDPLLWHDKPLTEVLCYKEIYTIRKDVAPDLKVDKVVDNGTKEILKKRLKEYSNNAKEAFSNLESFPIWQNEEKGIKIKKVTITGVANAEPLHTAKDHLGNTLIDVNNNKIPVDYVSTGNNHHIAIYVSNKGELDDDVVTFYDAVIRSNQDQPIVRQFNSNGWPLLFTLKQNEMFLFPSEDFEPANIDLADSSILSKVSQNLFRVQKFSKLQYGKSFIRDYVFRHHYETELNNQKQLKDIAFKNIKSLGYFNGVIKVRINHIGQIVYVGEY

SEQ ID NO: 23951 - protein, 1263 aa, unidentified
  REGION 1..1263: note = Cas Enzyme sequence
LDLGTTSIGWALVNEANSKNEVSSIVKVGVRVNPLTVDEKINFEGGKPITTNADRTLKRGARRNLDRYQMRRYFLIKELLKEKFISGETPLTEIGKDTTHQTISLRALASNHKVSLEDLSKIFLAINKKRGYKSSRKTKDENDGVAIDGMDVAKILYNERLTPGEYVYNLLQKKKNFIPDFYPSDLKAEFKAIWLKQKEFYPEIFTIELFQNLQGKNKGQTWSLCSKPFRIEGVKIDGNKTEQKLQRYKYRVGALSEQLDLEHLAIVLQEINGNINGTSGYLGRISDRSKVLYIDKLTVGQYLYDQIKINPHTSLKNQVFYRQDYLDEFEQIWETQAKFHPELNKDLKEKIRDVIIFYQRPLKSQKGLLSFCLFESWQEEYFDEVKQKQRKRTIGQRVVPRSSPLFQEFKIWQNINDLDFKYIGKPDMESELKDEKEFYKLEDEDRELLFAEANLRGDLSATTVFNLLGISSKEWKINFKEGIQGNTTNEKIFNVYQEIAKREGYGIDWQKATATDILEELCAVFPEIGIDPSILEFDANLAGNAYSKQSSYELWHLLYSAGDDKMISKEDQLVYGNKDVNLKKKLHNKYGFAPEYAAMMAHLTFPNDYGNLSARAIRKIVPHLQQGRNYYEACDTVGYNHSNSLTKEENDKRVLKDRLEILGKNSLRNPVVEKILNQMIHVINQVCDTYGKPDEIRIELARDLKKSAKEREETAKYINTATKVNLDIANTIQKQFGFTPTKNDIVKYKLWLELAPRGHKSLFSDEQIKLEDLFSSKIDIEHILPKALIYDDSQSNKTLAYRHVNLKKANRTAIDFITQDHNANLEIYKERVETLYDNGKGTISRGKRDRLLKGAKDIKEGFIERDLRNSQYIAKKARIMLLEVFKEVTPTTGRITDRLREDWGIINVLKELNLPKYRALGLIKIEERKNDKKIEKIKDWTKRNDHRHHAMDALAVAFTTHNHIQYLNNLNARRDELHEKHKRIQNIENLITEKVKDDKGNYKRKFIKPMPKFRTESKKHLEAVLVSFKAKNKVVTRNINKTKTKKGFKSTLQLTPRGQLHKETIYGRSKAPKSKPTKVNKNFAFEEAKLIVNSGQRDLILKHLGEYNNKPEKAFDTKTLKEQPLIWNGDPLKEVICFEKIYTIRKDITPSLKIEKVLDEGIREILQKRKQAYNGNAKEAFSDLDKNPIWQNKEKGIAIKRVTISGVSNAEPLHVAKNYLGNFILDINGAKTPVDYVSTGSNHHIAIYQSDDGKLDDDVVSFF

SEQ ID NO: 23952 - protein, 1380 aa, unidentified
  REGION 1..1380: note = Cas Enzyme sequence
MKKILGLDLGTTSIGWAFVHEAENEQEKSTIINTGVRVVPLSTDEKINFNKLNAVTAAAHRTASRGARRNLQRYKLRRQELLSILQGHGFISKNDILSENFENSTYFTWKIRAHAASDPISKKELAMVFLAINKKRGYKSSRKANNQEEGQLIDGIGIAKKLIEENLTPGQFNHKLKTEGSRYLPDYYKSDLHKEFEKIWKTQSIYYPEILTDTHLKELDGRTNKATAYYFEKVMLIERAENKGKEKKLQEYEWRSDAVKQQIPLEQIAYILTELNNDINKSSGYLSAISDRSKTLQFNNLTVGQHQYAKLFGMPLASQKNQVFYRQDYLDEFNTIWELQSKHHPELTDDLKVEIRDVIIFYQRRLKSQKGLISICELESRKRTTTVDGKTITKLTGPRVAPKSSPLFQSFRIWSNINNIVVTSKTDKKQIYQLDEETKKALFKELSWRSSMTDNQFLTWLFAGSKEKVGDYEIKYGKIEGNRTNEELLNAYLKITVLEGYDINTKQDKVDVVKDVRSCFKEFGIKDSLFHFKWDLQDTTMIATQDSYELWHLLYSYEDDSSNTGLDSLNNVLIEKYGFPTNHTGIMSSVTFEKDHASLSARAMRKILPYLEDGMVYSDAATAAGYNHSRSVTKEENLKRELKDQLEILTKNSLRNPIVEKILNQMINVVNAILAEPSLGRPDEIRIELARELKQTAKQRADATTQIAKATREHEEYREIIKKEFGLPYVSKRDLIKYKLYRELKSNGYKTLYSNTYIKPDELFSKKFDIEHIIPQSIRLDDSFSNKTLELRDINIEKGSQTAIDYCQRKGYEDRFIKTVQTLATVIDGISPRKMLKLFTKIEDVSTDFNERDKNNTGYISRKANEILIDVTRNVYATSGTITSMLRSDWELIDVLKELNWSKYDTLGLTYYETNKDGQKLPKIKDWSKRNDHRHHAMDAITVAFTKPALIQYINNKSAKSKGNIIIYNIEEKFTYRDKDGKRRFVKPAPDIREQSKKALASILVSHKAKNKVVTDNINIIKIKGGTIKKKQSTPRGQLHLETVYGASKFYETKLETINASFDEQKINTVSNKQQREALLSRFRESGNDSKQAFTGKNALSKNPLKLSNGDELPLKVQTVALQTRYTIRKPINADNFKDEKTIAKIIDIGSRNIVLKRFLESGKNSKAAFSNLDENPMWLNKEKGICLKTVTILGISNAVSLHVKKDMNGMPLNDPTGKEIPADFVNTGNNHHLAIYESPTGDWDDNVVSFFDAVTAVNNKQPAVAPRNEKGWLLKFSIKQNETFLIPPSEDFFKDEDLKDISNKSALSPYLFRVQKFSKLQYGNSYVREYMFRHQLETELNDKKVLNGIAFNTFKSLKPMKGIIKVRLNHLGNIVETYT

SEQ ID NO: 23953 - protein, 1380 aa, unidentified
  REGION 1..1380: note = Cas Enzyme sequence
MKKILGLDLGTTSIGWAFVHEAENEQEKSTIINTGVRVVPLSTDEKINFNKLNAVTAAAHRTASRGARRNLQRYKLRRQELLSILQGHGFISKNDILSENFENSTYFTWKIRAHAASDPISKKELAMVFLAINKKRGYKSSRKANNQEEGQLIDGIGIAKKLIEENLTPGQFNHKLKTEGSRYLPDYYESDLHKEFEKIWKTQSIYYPEILTDTHLKELDGRTNKATAYYFEKVMLIERAENKGKEKKLQEYEWRSDAVKQQIPLEQIAYILTELNNDINKSSGYLSAISDRSKTLQFNNLTVGQHQYAKLFGMPLASQKNQVFYRQDYLDEFNTIWELQSKHHPELTDDLKVEIRDVIIFYQRRLKSQKGLISICELESRKRTTTVDGKTITKLTGPRVAPKSSPLFQSFRIWSNINNIVVTSKTDKKQIYQLDEETKKALFKELSWRSSMTDNQFLTWLFAGSKEKVGDYEIKYGKIEGNRTNEELLNAYLKITVLEGYDINTKQDKVDVVKDVRSCFKEFGIKDSLFHFKWDLQDTTMIATQDSYELWHLLYSYEDDSSNTGLDSLNNVLIEKYGFATNHTGIMSSVTFEKDHASLSARAMRKILPYLEDGMVYSDAATAAGYNHSRSVTKEENLKRELKDQLEILTKNSLRNPIVEKILNQMINVVNAILAEPSLGRPDEIRIELARELKQTAKQRADATTQIAKATREHEEYREIIKKEFGLPYVSKRDLIKYKLYRELKSNGYKTLYSNTYIKPDELFSKKFDIEHIIPQSIRLDDSFSNKTLELRDINIEKGSQTAIDYCQRKGYEDRFIKTVQTLATVIDGISPRKMLKLFTKIEDVSTDFNERDKNNTGYISRKANEILIDVTRNVYATSGTITSMLRSDWELIDVLKELNWSKYDTLGLTYYETNKDGQKLPKIKDWSKRNDHRHHAMDAITVAFTKPALIQYINNKSAKSKGNIIISNIEEKFTYQDKDGKRRFVKPAPDIREQSKKALASILVSHKAKNKVVTDNINIIKIKGGTIKKKQSTPRGQLHLETVYGASKFYETKLETINASFDEQKINTVSNKQQREALLSRFRESGNDSKQAFTGKNALSKNPLKLSNGDELPLKVQTVALQTRYTIRKPINADNFKDEKTIAKIIDIGSRNIVLKRFLESGKNSKAAFSNLDENPMWLNKEKGICLKTVTILGISNAVSLHVKKDMNGMPLNDPTGKEIPADFVNTGNNHHLAIYESPTGDWDDNVVSFFDAVTAVNNKQPAVAPRNEKGWLLKFSIKQNETFLIPPSEDFFKDEDLKDISNKSALSPYLFRVQKFSKLQYGNSYVREYMFRHQLETELNDKKVLNGIAFNTFKSLKPMKGIIKVRLNHLGNIVETYT

SEQ ID NO: 23954 - protein, 1372 aa, unidentified
  REGION 1..1372: note = Cas Enzyme sequence
MKKILGLDLGTTSIGWAFVHEAENEQEKSTIINTGVRVVPLSTDEKINFNKLNAVTAAAHRTASRGARRNLQRYKLRRQELLSILQGHGFISKNDILSENFENSTYFTWKIRAHAASDPISKKELAMVFLAINKKRGYKSSRKANNQEEGQLIDGIGIAKKLIEENLTPGQFNHKLKTEGSRYLPDYYKSDLHKEFEKIWKTQSIYYPEILTDTHLKELDGRTNKATAYYFEKVMLIERAENKGKEKKLQEYEWRSDAVKQQIPLEQIAYILTELNNDINKSSGYLSAISDRSKTLQFNNLTVGQHQYAKLFGMPLASQKNQVFYRQDYLDEFNTIWELQSKHHPELTDDLKVEIRDVIIFYQRRLKSQKGLISICELESRKRTTTVDGKTITKLTGPRVAPKSSPLFQSFRIWSNINNIVVTSKTDKKQIYQLDEETKKALFKELSWRSSMTDNQFLTWLFAGSKEKVGDYEIKYGKIEGNRTNEELLNAYLKITVLEGYDINTKQDKVDVVKDVRSCFKEFGIKDSLFHFKWDLQDTTMIATQDSYELWHLLYSYEDDSSNTGLDSLNNVLIEKYGFATNHTGIMSSVTFEKDHASLSARAMRKILPYLEDGMVYSDAATAAGYNHSRSVTKEENLKRELKDQLEILTKNSLRNPIVEKILNQMINVVNAILAEPSLGRPDEIRIELARELKQTAKQRADATTQIAKATREHEEYREIIKKEFGLPYVSKRDLIKYKLYRELKSNGYKTLYSNTYIKPDELFSKKFDIEHIIPQSIRLDDSFSNKTLELRDINIEKGSQTAIDYCQRKGYEDRFIKTVQTLATVIDGISPRKMLKLFTKIEDVSTDFNERDKNNTGYISRKANEILIDVTRNVYATSGTITSMLRSDWELIDVLKELNWSKYDTLGLTYYETNKDGQKLPKIKDWSKRNDHRHHAMDAITVAFTKPALIQYINNKSAKSKGNIIISNIEEKFTYRDKDGKRRFVKPAPDIREQSKKALASILVSHKAKNKVVTDNINIIKIKGGTIKKKQSTPRGQLHLETVYGASKFYETKIETINASFDEQKINTVSNKQQREALLSRFRESGNDSKQAFTGKNALSKNPLKLSNGDELPLKVQTVALQTRYTIRKPINADNFKDEKTIAKIIDVGSRNIVLKRFLESDKNSKVAFSNLDKNPMWLNKEKGIALKRVTITGIQNTESLHIKKDIDGNTILDKNGKELPVDFVNTGNNHHVAIYKDEKGNYQEEIVTFYEAVARKNANLPIVNKIHEKGWKFLFTMKQNEIFLFSNDGFDVNNFDILNPNNAATLSAHLFRVQKIATKNYFFRHHLETELIDEQKLRGFTWENIRSTSPLKELIKVRINHLGKIVQINE

SEQ ID NO: 23955 - protein, 1375 aa, unidentified
  REGION 1..1375: note = Cas Enzyme sequence
MINSILGLDAGTNSLGWSIRDKNSTDNQIVDAGVITFDKGVASEKGIEFPKVQKRTESRGTRRNYQAEKYRKYALLEFLIQKGMCPLSLPELDKWRNYRKGIKRTYPSSNKKFMEWLAYDFDGDGKPDFHLFNGSIQESYYLFRAKAASNEPNDMAVFKEQPNILGRVLYQINQRRGFKNGDSEETETILKGSEKTGTSGRIAIEDYLKRFPTLGSALYNYQKENGGRIRQRYNLRTDYENELKLISGIHGYTKEEYNTLYSCIIWQRPLRSQSHLIGNCIYERKKKRAPLSHPIYKEFKAWVFINNLKIIAPERFDQVQYLRDIIYPLFVRKTDFKISALLKKIHDTGGSITSNFGNPRMANESVPALSDFADYASILGQNWINDYGFLQDINKREKQQSKKTGGKQSIYDIWHVLEKVEDKNFKMKYALSKLKLNEEQAVKFSNMRLESGHATISISAIRKILPYLQQGILYSHAVFLANIENVIGRAPQPEEVAILIEIVKSIDIEHRYDNLLNEIIRSLILKRKSQNHNRVDWEINNIESHITAQDVDETLALIYKDRFHPNKGYFGNKNLTTDIWRKFKTDDEILKNANRGKTFFETSTMESELLIQLERVFPTDNIDIRKLWHPSKEDIYGTSNEYATVSNKSKVSYVPYEHLTSYLEKHPASDFDGQVIRLLGSPEPLKKGFKNPMALKTLHRLRHLINDLLVKGKIDENTKVVIEIARELNYQNERTAIRNHQKKQEIVRKKASELIKSWNEKAQTNYDEYGESNIIRIILWQEQNERCLYTGRTIQAAHVLDGAKYDIEHTIPASKSFDTEMKNLTLCDKHYNNTVKNNRIPYELDNYNDILNNVHFMAEHIEYWSKVEYKYIMRAKQNSDKPSKDDAIVKKHEAKFELKYWREKYNAFIITEYKPSWKNSQLRDTQIITKYARPYLKTIFKNVQVEKGIVVSHFKKIFQVQLDDKKNRAMHKHHAIDAAILTLIPQHDRRDFLLEKYFKKQEKNMKFHAIPDDYANFKAKHIIELGDGLIINKLTDDRTLIPTFKKYRSNGKIKTKDGNTIWQNGDTIRGQLHSESFYGAIKLPALDADGKIELDENQNIVLEDKISMVIRKPFKYKTGPNDTGFSSLEELEKIIVDKVLFKRIKVSIGNESFKDAMLKGIILPGQQNPIRRLRCFASSGNGLMKYETAVKVREHNISSPKEYKQFIYSVNATIPYCLLYINNAAKKTVKKIRPVALMELSKHKIKHTNEFFVNPEFSLSKVQKDNEEQMPLAYVLTAGQRVLFYNEDAEELRDVETKLTDRLFVMYQFETDGRIKFRHHMLAGELTEAKKAYKELSFFKTSDFSPLLRLRQANWNFLIENEHFKIEMDGSIIWL

SEQ ID NO: 23956 - protein, 1348 aa, unidentified
  REGION 1..1348: note = Cas Enzyme sequence
MKKILGLDLGTTSIGWAFINEAEGDDETSSIINSGVRIVPLTTDEEADFKKGNTISINADRTLKRGARRGLQRFKQRRNALLQTFRGVNFINSNYVYAETGKQTTFSSYKLRAKSATEQISKEELVQVLLMLNKKRGYKSSRKAKSAEEGDAIDGMKIAKELNDKNQTPGQWVYNLLLNGGKFIPDFYRSDLQTEVEKIVRFQNQFYPEVINPKLHEDIQGKTRTATSQHFTTTLKIELSENKGTREETKLQHYKWRNDGLSSQLDIKVIAFVLTEINNQINQSSGYLGAISDRSKELYFNHETVGQFQYKQLQQNEHAKLKNQVFYRQDYLDEFEQIWETQSQFYTELNQKLKIEVRDITIFYQRKLKSQKHLVSFCEFEKGHKAIPKSSPLFQNFRIWQNLNNIIVKNETTKEPFQLDEDLKNLIAQELLFKESMTDTQMLTFCELKKGTHTVNFKKIEGNRTNTSLFNAFEKILILEGYDELDLSKLDSLDIKNIVKSAFSDLEINTAILDFDPTIQENDFDKQPYYQLWHLLYSAEEDEILKKSLMSKFGFKENHIPFLLNINLQADYGSLSARAIKKVLPHLMDGHIYDQACLLTGYNHSSSLTTEQNESRILKDHLGLLKKNSLRNPVVEKILNQMINVINAIIEDPTMGKPDEIRVELARELKANNEQRNEMTKAINNATKTHDDIRKLLTVEYGISRVTRNDIIRYKLWKETGGISLYTGKPIEASRLFTKDYDIEHIIPKSRLFDDSFSNKTICERTLNIEKSNKTAYSFLREKLTPEEFDQFEKRIKSMFGKISRTKQNKLMMADDQIPEGFIDRQLRETQYIAKKAKEVLLEVSRNVTATIGSVTDKLREDWELIEVMKELNWDKYHKLGLTKEEEGKNGERLYKIQDWTKRNDHRHHAMDAITVAFTKPAYIQYLNNLNARTNTDKKGNSIIGIENKYLKRDKNNKLRFIEPMPNFRSEAKKQLESILISYKAKNKVVTNNKNTTNKSGGTNQKIQLTPRGQLHKETVYGKLQQYATKEEKVNANFTQEYISKVAKKDYREALLKRLAENDNDPKKAFTGKNALAKTPIYISLKDNIVVPEKVKMVWLENNYTIRKDVTPDLKLEKVIDGGLKEILHNRLNEFNGDPKKAFVNLDENPIWQNKEKGIAIKRVTISGVSNAQALHTKKDHFGNEILDENKNPIPVDFVSTGNNHHVAIYRDDKGNLQEEVVSFYDAVVRKNLGLSVINKTHKNGWEFLFTMKQNEFFIFPSDSFDPQEIDLLNPENYHLISPNIFRVQKFGSLHSGFWFRHHLETQIEVPKILKGITFIVIQSSNNLKNIIKIRINHLGQIVQIGEY

SEQ ID NO: 23957 - protein, 1646 aa, unidentified
  REGION 1..1646: note = Cas Enzyme sequence
MDMKKILGLDLGTNSIGWALIDQDFDAKKGNILEMGSRIIPMNGYVSSSSGKESKDPASDFALGNGISKNKARTDLRGTRRLRERNLLRRERLHRVLNILNFLPNHYSSQIDFDKRLGKFLEDTEPKLSYQPLWNEVKNKNEYEFIFKESFEEMLDEFRQKQPQLLLDKKGDPALVPYDWTIYFLRKKALSEKISKEELAWVILNFNQKRGYYQLRGEEEEVDSSKLVEFHSLKIVNVIADEPQKGKSDIWYSLVLENGWIYRRSSKIPLFDWKDKTRDFIVTTDLNEDGSVKTNKEGEEKRSFRAPSETDWTLVKKKTEQEIDQSQKTVGAYIYDSILQNPKQKINGKLVRTIERKFYKDELRQILKKQADFHSELKDEDLYNDCVRELYRNNEAHKAQLGQKDFVHFFLNDIIFYQRPLKSQKSTIGNCTLEKRPMKDAKGKLVKDDKGEQVFKSLKAIPKSNPYYQEFRLWQWIYNLSIYRSDDDSASVTSEFLASIEDFEKLFEFLNGRKEIEQKPLLKYFLERQGLKGKSLTAELEKYRWKYVEDKKYPCNETRALFQSKLDKVEGVEDDFLSRDIEQDLWHIIYSVTDKIEYEKALKSFAKKHQLDRESFVESFKRVKPFDSEYGAYSEKAIKKLLPLMRVGKFWNESDIVKESPTYLKNIENLLRKLEEQKKRISDSNTEKWDNDINSKFYDELKMFLDGDISTFQKLRLHIASYLVYGRHSNPAEIGKWNSVDDLQKYLQDFRQHSLRNPIVEQVVTETLRVVKDIWSNYGKGAKDFFSEIHVELGRDMKNTAPERERITKQVTENENTNLRIKALLAEMLNDANVENVRPYSPMQQEILKIYEEGVLNSAIEIGDDILKISKTAQPSSSDLKRYKLWLEQKYCSPYTGRPIPLSKLFTSEYEIEHIIPQSRYFDDSLSNKVICESAVNRLKDNQLGLEFISNHHGEIVDLGMGKTAKIFEVDAYQDFVKQHYAKNRTKKNKLLLEEIPEKMIERQLNDTRYISKFISGLLSNIVRADSNDEGINSKNLIPGNGKITNELKQDWGLNDVWNELILPRFERMNTLTNSTDFTAWNEKHQKFLPTVPLELSKNFSKKRIDHRHHAMDALVVACATRDHVNLLNNKHANSSTRFDLNRKLRKYEKAVYPDRKTGEIIEREVPKNFLKPWDSFTTDAKAAMSSIVVSFKQNLRVINKANNKYEKWVEKDGVMVKELHTQEGVNWAIRKPMHKDTVSGLVNLRRTKTVSLNQALEVVNDVVDRKLRAELLRLVSIGYDKKRISKHFRELNNHYNEQDISKVEIHFWEEDNVASRVSLNDSFDEKRIGSITDTGIQKILLNHLALYSGKLDEKGKEISPSLLAFSPEGIEEMNATIQKLNGGKFHQPILKVRTYEPKGNKFTVGSAGNKSSKYVEAAKGTNLFFAIYQDEDGKRNYETIPLNIAIERQKQGLSSVPERNEKGDLLLFHLSPNDLVYVQGEGTRETSYEQFGDLRDFGSAIYKMVSSSGTQCFFIRNDISTPIVNKVEYSALNKMERAINGVMIKDVCIKLSVDRLGNVSTRFEKRLKYNLPKNDPMQVEEPRVAYSGSKQIQISGQLDDSESSQLTYWAGLSPKQRFEDFLELMNRFYEFSTPDWKTKKISIDL

SEQ ID NO: 23958 - protein, 1552 aa, unidentified
  REGION 1..1552: note = Cas Enzyme sequence
MKNILGLDLGTNSIGWALVKQDFKEKQGEILGMGSRIIPMTQDIKDEFGKGNSISQTADRTGFRGTRRLRERFLLRRERLHRVLNVLGFLPEHYANQIDFEKRLGKFLDEKEPKIAYKEIWNSEKEKNEFDFIFKDSFELMLTDFRKYQPQLLENEKKLPYDWTIYYLRKKALYQKITKEELAWILLNFNQKRGYYQLRGEEEEENPNKLIEFYSLKIIKVIADEKANAKGETWYSLHLENGWIYRRSSKTSLLDWTDKVRDFIVTTDLNDDCSIKTDKEGNEKRSFRAPSEEDWTLIKKKTEQEIVRSEKTVGTYIYDTLLQKPNQKINGKLIRTIERKFYKEELKAILKHQLKEHPELQNKDFFNDCVRELYRNNESHETTLSKKDFVHLFLNDIIFYQRPLKSQKSSIGNCVLEYRTFKTKDKEGKEIEKKEYLKTIPKSHPLYQEFRIWQWLYHLKIYKKEEDTDVTNQFVKSTEDLENLFAFLMTQKEVDHKDILKFLFSSSGLKGKLLTSEIAKYRWNYVYNSEKDESKKYPCNETAYEIKRRLVKVENISVEFLSNEVEFKLWHLIYSVTDKLEFEKALHSFAKKHNLDESTFVENFRKFPPFKSEYGSFSEKAIKKLLPLLRLGKYWNWENIDTLTKDRIDKIITGEYDEEIKNRVREKAIHLTKESDFGGLQLWLAQYIVYDRHSEANIAGKWNSVSDLENYLEEFKQHSLRNPIVEQVVTETLRVVKDIWAKYGSGTKDFFNEIHIELGRDMKNTAEERKRLTNIVSENEATNLRIKLLLTELKDNSDGKLQVEEVRPFSPPQQEILKIYEDGVLNSNVEVPEDILKISKTAQPSKSELQRYKLWLEQKYRSPYTGQLIPMSKLFTHEYEIEHIIPQSRFFDDSFSNKVICESAVNKLKDKQLGLEFIKNNSGEKIETGFGKSVEIFSEQEYLDFIKEHYAKNRAKKTKLLLEEIPERMIERQLNDTRYISKLISNILSNIVRSDRNDDGINSKNILPGNGKITTTLKQDWGLNDVWNDLVLPRFERMNQVTQSENFTSWNENHQKFLPTVPLEFSKGFQKKRIDHRHHAMDALVIACATREHINLLNNKHAQSAERFDLNRKLRKFTNITYTDLKTGKRIEKEVPKDFLKPWDNFTKDAKDELDKIVISFKQNLRVINKTTNRYESYKHENGTLRIGKDGKPKKDFITQTKGDSWAIRKPMHKDTVSGLVSLRKKKIVALNIALDNYNEIVDKELRQEILKLVKLKYDKKLLTKFFKDKQNKWNDKDISRIEIYFWDNDNVASRVSLDTSFNEKRIVETITDTGIQKILLAHLKIYKNKLDEKGKEIAPEIVAFTAEGIEEMNKNIMVLNEGKFHQPILKIRTYEAKGNKFNVGLTGNKKDKFVEAAKGTNLFFAIYQDEIGKRSYETIPLNIVIERQKQGLDSVPEINEKGSKLLFHLSPNDLVYVPTEEEKGNSNSIDFSNLNKRQIERIYKVEKTSGVECYFIRQDIAYLIKQYDAKTKIGELESQNKLQSTMSTERLKIAESCIKLKVDRLGNISKA

SEQ ID NO: 23959 - protein, 1569 aa, unidentified
  REGION 1..1569: note = Cas Enzyme sequence
MLINFCRFIIIDKPIAMKRILGLDLGTNSIGWALTNNDFDNKLGNIEGLGSRIIPMAQDAMGIFESGAPITTQTAQRTEYRGKRRLVQRFLLRRERMHRVLNILGFLPKHYSDAIDFDTKFGQFKPEREEKLSFYKNEYNKNQFLFMESHQQMLSEFNLINPDLKQVPYDWTIYYLRKKALTQKISKEELAWILLIFNQKRGYYQLRGEEKEENKNKLEEFHKLTVVNVIEREKGKSGIWYNLILENGWIYKRESKIALFDWVGKQKDFIVTTELNDDGTIKLNKDNEEKRSFRSPKEDDWGLVKIRTEQTINQSGKSVGSYIYDELLKNPNQKIKGELVRTIERHYYKSELKQILETQIEFHSATLKDGNLYEKCINDLYKHNDSHKNNIKDRGFDYLFIDDIIFYQRPLKSKTSLISDCSLEFRPVKDKIGKLVKDVNGIQIVKPLKCIAKSNPIFQEFRLLQFVKNLKIFRKDISNDVDVTNDYLKTEEDVVELYNWLNDKAEVSQKQFLAYQKFKLKEDTYRWNFVEDKIYSCNETRNQFLNATAKTDIDQSFFDAKNTQDLWHILYSVTDKTEIAKAITTFAQKHNLPDEFVVNFSKIKPYKKDYGSYSEKAIKKLLTLMRRGENWNQDTISDRITSKIISIKERLESINYDASILEKVSDSDIPKQVLKSFINCTDFNKGLNTYQASYLIYDRHSEASDISKWKTPSDIEHFLKHDFTQHSLRNPIVEQVITETLRVVKDIWQHYGEGKANFFNEIHIELGREMKNNAADRKRITETINKNENTNLRIKAILTELKNDGISDIRPYSPSQQEILKIYEEGIYSNENSKEKIEEVDKIRKNAKPTTAEINKYKLWLEQGYLSPYTGQPIMLSDLFTTKYQIEHIIPQSRLFDDSLSNKVICESEVNELKSNMTALEFILKNEDRIVTLTGGKTVKIFTKETYNQHITSYYSKNKSKQKRLLSEDIPEKFIERQLNDTKYISKIVRNLLSKIVRDDDEQEVTSKHIVTLNGSITSRMKQDWGLNDVWNKIITPRFERLNAITNSSDFGKLEFKKDEFGNTGKQVFQTTVPDAIAKGFSKKRIDHRHHALDALVIACVTKDHVNYLNSINSERTNYSLVSKLRRIEEIQNSGKTQKVAKEFHKPWENFTKNTEEELNKTIISFKQNTRVINKTVNKYVSYKDEKGNLNIGKNGLVEKKIIPQTKGDNWAIRKPMHAETVSGKVFLKRIKQSHITIANAIEQIDLIVDKEVKKQLVTKIKQYPNNDAGLKKHLKAFPVMIDGKAIDKIQIYETVGGENGATATRKTLDITFDEKRIEKITDTGIQKILLNHLKQEIYQYAIDENGEKIPAYEIAFSENGLDELNKNITTLNNGKKHQPIKKVRVFEEGSKFSLGQTGNKVDKYVEAAKGTNLFFAIYQDEKGKRNYKTIPFNEVIERQKQGLSSALEIDENGNRLLFTLSPNDLVYIPTNDEKENLTHLHFDKLSKEKAERICKFVSCTGGEGHFVSHNYSKEIISNENGSNNKSERILEFNTSNTIYDEKAKPVMIKSICWKLEVDRLGKIKKIIR

SEQ ID NO: 23960 - protein, 1380 aa, unidentified
  REGION 1..1380: note = Cas Enzyme sequence
MKKILGLDLGTTSIGWAFVHEAENEQEKSTIINTGVRVVPLSTDEKINFNKLNAVTAAADRTASRGARRNLQRYKLRRQELLSILQGHGFISKNDILSENFENSTYFTWKIRAHAASDPISKKELAMVFLAINKKRGYKSSRKANNQEEGQLIDGIGIAKKLIEENLTPGQFNHKLKTEGSRYLPDYYKSDLHKEFEKIWKTQSIYYPEILTDTHLKELDGRTNKATAYYFEKVMLIERAENKGKEKKLQEYEWRSDAVKQQIPLEQIAYILTELNNDINKSSGYLSAISDRSKTLQFNNLTVGQHQYAKLFGMPLASQKNQVFYRQDYLDEFNTIWELQSKHHPELTDDLKVEIRDVIIFYQRRLKSQKGLISICELESRKRTTTVDGKTITKLTGPRVAPKSSPLFQSFRIWSNINNIVVTSKTDKKQIYQLDEETKKALFKELSWRSSMTDNQFLTWLFAGSKEKVGDYEIKYGKIEGNRTNEELLNAYLKITVLEGYDINTKQDKVDVVKDVRSCFKEFGIKDSLFHFKWDLQDTTMIATQDSYELWHLLYSYEDDSSNTGLDSLNNVLIEKYGFATNHTGIMSSVTFEKDHASLSARAMRKILPYLEDGMVYSDAATAAGYNHSRSVTKEENLKRELKDQLEILTKNSLRNPIVEKILNQMINVVNAILAEPSLGRPDEIRIELARELKQTAKQRSDATTQIAKATREHEEYREIIKKEFGLPYVSKRDLIKYKLYRELKSNGYKTLYSNTYIKPDELFSKKFDIEHIIPQSIRLDDSFSNKTLELRDINIEKGSQTAIDYCQRKGYEDRFIKTVQTLATVIDGISPRKMLKLFTKIEDVSTDFNERDKNNTGYISRKANEILIDVTRNVYATSGTITSMLRSDWELIDVLKELNWSKYDTLGLTYYETNKDGQKLPKIKDWSKRNDHRHHAMDAITVAFTKPALIQYINNKSAKSKGNIIISNIEEKFTYRDKDGKRRFVKPAPDIREQSKKALASILVSHKAKNKVVTDNINIFKIKGGTIKKKQSTPRGQLHLETVYGASKFYETKIETINASFDEQKINTVSNKQQREALLSRFRESGNDSKQAFTGKNALSKNPLKLSNGDELPLKVQTVALQTRYTIRKPINADNFKDEKTIAKIIDIGSRNIVLKRFLESDKNSKAAFSNLDENPMWLNKEKGICLKTVTILGISNAVSLHVKKDMNGTPLNDPTGKEIPADFVNTGNNHHLAIYESPTGDWDDNVVSFFDAVTAVNNKQPAVAPRNEKGWLLKFSIKQNETFLIPPSEDFFKDEDLKDISNKSALSPYLFRVQKFSKLQYGNSYVREYMFRHQLETELNDKKVLNGIAFNTFKSLKPMKGIIKVRLNHLGNIVETYT

SEQ ID NO: 23961 - protein, 1383 aa, unidentified
  REGION 1..1383: note = Cas Enzyme sequence
MEQKILGIDLGTNSLGIALRNIDKGGNITNQLDYYSSIIFNSGVGKDTKGEYSYAAERTKYRSTRRLYQSRKYRIWATLKLLIVHGCCPLSEDNLKRWSKYDKEKGLKREYPIDVPEFEQWVRLDFDGDDIADYSSPYQLRAELLERHLDWNSQIDRYKFGRAMYHIAQRRGFKSSKGETLKDAGDNEDLSTIEVESAMKKSEEKKSKGIAEFMNAHNLETVGCAFAKLEKDGIRVRNHPEYQAVQSQYREEVEKICRHQHIDTLSPELYRGLMSTKKGEGTIFYRRPLRSQKGNIGKCTLEPTKRRCPVSHPDYEEYRALSFINNIKYRISPDEEWKNLTDTERWEIFDTLFCRAKSTFKFVDIRAWIEKSHNGVHLDYNSRTINYRDYTTVAGCPIISRLKKILGNEWRIKEIITVRERTNNKSGEIHKVSYNYEDLWHLSFSCDDYEDLYEFVQIRLGFNETQAKEMTRMWSSLQDGYTTLSLKAIRNILPFLREGMIYSDAVSLAKIPDIIGKERWVTSRDSVLSSIEAINNNTAHNRLVYNLTNTVISNYKALSFEEQFAYKNTNYTLTYIDREDILQCCIDYYGEKRWGQISKTEQISLQNEIARLYQLFFASSKREYYKLPKTSDTLKEYLSILFPDINNKDWDNLYHHSQISLFPQAQPKLGTPDIGSIKNPVVLRALHVLRKAINALLTEGMVDEDTRIVVETAREMNDANWRRAIERYQKEREKENAAIAEIIREFRPNYTDSDIDKGRLLFEQNIIAEANRDAKQKAERFALDLQKYKLWKEQNFQCLYTGKHISVSDLFDDSVVDIEHTIPRSFSFDDSLSNKTVCFAHFNRYTKNNQIPSELSNYNEILLRIKPWEDKLEHIMSQIELWKGKARTAPTIERKNECLQQKHQWELERDYWRAKINTFTIQKDEMDLGFRNSQLVDTRIISKYAFHYLKSVFNRVDVEKGNVTATFRKILGVQSVDEKKDRSKHSHHAIDAAILTIVPTAAKRDKMMELYYKLEDAPDSEKENFRIALQQEVRDCRIGSANGLLETIEKNILVNHITKDQTLAPSHKRRRINGHVIEGQWQTGDSIRGSLHKDTFYGAIKSPTGDLFMVKRTPLKNMSEKDIVTIVDERLKEMIRTQLKHKMEDEGLSASKAMESDFYMLDTNGNPITQDRNGRPIAPLRHVRCYAKAGRGFLKIDTALPIKRQTYPSKQEHKNTYYAQNDDNYLCLFYEGMVKGKVQRAFRLVNYLDVAKLNLKNENTLFREPEFAHYEGSQSMPLRAIIKKGTRVLLFANSPDEIPDLDNDALSKRLFIAYKFNTMGTPTIYLRHHSEARPETQCDSSEKSSSFDATTPFSYLSLKASNFKALIEHSDFEIDPLGNIVFK

SEQ ID NO: 23962 - protein, 1419 aa, unidentified
  REGION 1..1419: note = Cas Enzyme sequence
VGKITKNTTIMKKILGLDLGTNSIGWAVVSTDENGTPTHIEGMGSRIIPMGSDKIDYEKGATITKNADRRAKRSARRMGKRYKMRRNKLLFILSKLNMLPEQIQFKTDFPEATKIQDLELLPIAKYTMQLDSLQHYELREKALHEQITLQELGKIFYQYNRLRGYSGGGDDNESKKEKVDDDDNKKYEVRVQKFLIKDVVKSDITYTAKSGKDKGSELPIYNIIVIDEDEEIEGTTKLQTLSDKIGEEIELEIRIKKTKKGDNIAFALPQKTNWRKQMEGTELLLKTKHYYPCQLFAEDLRNNKWTKIRNRVILREQYKREFDAVWAEQAKYYPILEKCPNDVLHEIVSYIFPGPSDSQKKLREIGLKNGLKYIIKEQIIYYQRPLKSQSDLIGTCQFEKEEKVIPITHPLFQEFRCWDQINRLYIRSKQQIWNEKKGKFVLQYQNRYLTEEQKYSIYNRLQEQKQLGFKEVAKIVNLRDDQSEFLNGLHVKAKLSGCDTRISIKKILKGYCEPDTFLIENIWEAVYNNVHEGSEYDESSKRVLSIINALPEILGNEQRTELALKIAQNIKFVRKYASLSKKAIENILPIMRPNPKVIPEKVKKNFEDIKWLIDTGEVIDESILQDYIIDFVKNNPQALVHGGLMYAFASSLVYGRHTKEEVKPQLKDYHEIKYVERNLRNPIVEQIANETMQVVKALWKQYHLHPDELEIRVELARDLKNSAQERDNIFKAQNKNRNSNERIKERLKQENVPVTDLNILKYKLYEQQSYISPYTKKTISFSKLFDDNFYNIDHIIPKSRYFDDSIANKVICESNINEEKDNRTAWEYISQQSSQFAILTPEDYLNHINSSFFGQKKKNLLAEKIPSNPVARQMKDTQYISIAVKDELAKIVGSEHVKTTTGSVTDYLRSQWGLRRLFMELTEDRFKQMELWSLNEDGTPKESWIRKGYDETTLKNVYEIKGWSKRYDHRHHSIDALVVALCNEKFVKRLNDLNKYFQEELAKHKSSIPIIDEDSIELAFFNLPKEKRNKIMQEIESSRKFDAPFDNLVAEAKYLLESMIVSQKPKDKLSIKEDLNGKKQLKIRAALHQETYYGKTNGRDTKTIAISMLKAKDIPQIIDEILKNEIDSHRKKYDSMKEAFTGEGLIAFNESRFQAKNRSALKPPVYKVKLWYSNKEKETGNLQPLYGKSAKKTVVTGDNYMFIVMGKGGKRDFTIASLYDSVSLAKEYLKQGIVDIESIKKNICDDLCVSNGENGKDGKADHVLFYLQQNDLVYMPKEDDELLRYNELELKKWFSDTNNRIDFAKRVYKVVKFTGNKCYFIPNNYAKEISIPKDFSKEEIEKLKSNYKDKAIPKQEQNYIEFGTYSNCTPFEKNELFTLSLSQGSKYDGAKPRKIQDYCIKIKTDWLGNVIKFNGISLL

SEQ ID NO: 23963 - protein, 1089 aa, unidentified
  REGION 1..1089: note = Cas Enzyme sequence
IVNDGQLDLFNHTTTGKLLTDVDVTSELLRTEDDYVKLFEWLNNRSAIKQDTLLNSYFKIKKEKGNNKYPYRWNYVEEKEYPCNETRAAMLNGFERCGISQELLTPELQMALWHILYSVEDKIEIAKALKTFANKNNLGDSFADVFCKMKPYKKEYGSYSEKAVRKLLPLIRIGKYWNKVDIDSKTLDRINKIITGEYDENIKNRVREKAIKLTEIEHFKGLPIWLACYIVYDRHSEAKEIEKWEKPEDIDRYLNNFKQHSLHNPIVEQVVTETLRTVRDIWKKEGNIDEIHVELGREMKNPADKRKRMTERILQNENTNLRIKTMLMEFLNPELGIENVRPYSPSQQEILKIYEENALDNLTKEDEEYDFVSKISKTAQPSKSDVIRYKCWLEQKYRSPYTGIMIPLSKLFTPAYEIEHIIPQSRYFDDSFSNKVICESEVNKLKDRQLGYEFIKNCAGQRVPLSLGGSVEILSLDKYEKLVKDFYAGNRIKMKKLLMEDIPDDFIERQMNDSRYISKLIKGILSNIVRERQANGEYEQEAVSKNLISCNGNITDRLKKDWGMSDVWNHIILPRFQRLNELTGTKNFTTLNREGHEIPEMPLELQRGFNKKRIDHRHHAMDAIVIACTTRDHVNLLNNEAAHSKHNKNRQQLQNKLRHFITLTIDGKERRFAQNFIKPWDNFTTDAWNVLQNIIVSFKQNLRVINKTTNSYLHYDENGKKKYVKQTHGDSWAIRKSMHKDTIFGEVNLRKTKTVSLNEAIKKPEAIVNKDFKKKVKELLLEGRDTKFIKKYVEDNKDIWTDINTSKIEVYYFTKDEKKRNGEPKERYFATRKALDDSFDQKKIKESVTDTGIQKILLAHLENKGNNPEQAFSPEGIDEMNRNIVALNNGKLHQPILKVRVYEKADKFAIGQKGNKGKKFVEADDGTNLFYAIYQNRDKQRVFATIPLSLSIECQKDDSKNWIKLLDERLRDKTPIEELQKYQKLDIPEEAQLLFILSPNDLVYIPTDKEAEDGIQQPNIDRIYKTVSFNKKQCFCIKNSVATPIVNKVEYTSSNKMERAITGEMIKETCIPIKVDRLGNIIELNGKKV

SEQ ID NO: 23964 - protein, 1445 aa, unidentified
  REGION 1..1445: note = Cas Enzyme sequence
VNSNSQNSILFGANVQSFLIITINDIKKMAKILAFDPGTNSLGMVCRDTLSNNLMDQITSGVDIIRDNTESDSRGRHSSAASQRRSFRNARTRYRSVKRRKQATLKLLIKHKCCPLDVESLNQWRFDDDEKGYDRTFPVKNEAFMKWINFEFVIEGEIVRSVYRLREILATKPLDYSKPESWLMLGRAIYSIAVRRGFKSSRLAKASDAEDEEQTEIQASEAELSKSLDQYMREHNCPTVGAAFSRMERVEKIRIRGNSDYKPIRSMLKEEIKEIFKVQKLDIEGKDYELYNGLMSEKKHEGTIFYKNPLKSQKGKVEYCTLEPHKRRCAKSHPANEFNVAWQLLNNIKIKKDGQWENIDLAFRRTIFDKLFVRNKKHFDFQEIRELVQEKYHIQLAYKESINYSDKKSVPACPITYYLQKILGPSWKIEKIKGTKKHLTHAQKRKNLSVEVYGHHTEYTADDIWHICYESDEKQFAIDFAKNALHLTPSEARSMGALWENIQDGYANLSLCALKKINPFLDKGYKYSDAVMLANLPNIMGTTFFKQNEQDIVNLIDEERAIISDTNRIYDIANKLISEYKALRMEDLAFAEHDYEYTLREDDIADVKKACAENYGKAWDVMTDDIQSAVITRVAKLYQEFFFSSKRDYYKRINITGALKKALAEKYPFLTKNKLAKLYHHSNNAYYPSATTNENGILQLGRPARGNLKNPTVLKVLYKIKQNVNKLLINGDIDSDTIIIVENAREALNDFNMRWAIEEYNSKRERENKAIEDALNDLAKEYHLALPKESVAMARLALYQNVNFTPYNPNESRRLYDKLCEKYKLWLKQGFFDFYTGRPISLSELFSPDNLVEVDHILPISKSFDDSISNKVLSSSRYNSDIKGTKLPCELPNYSVDTAEGTAIIHRIHEIEEKVKYLEEKVMYWKGRSSRAADPDSKNSAIKQRHLWQMEYDEWNQRLTNLTAKEITPSFRNNQLNDTRMISKYAYHYLKSVFGRVVVQRGQTTAVFRKIFGFQEAYEKKDRSRHTHHAIDALTLSLIPYGTKRERMMELWYQIQEAHRFKDYDLEHQLKDRLEREKLLCGLGRYSPDEVIRYIEETTLVKNDATNNALTKNIKRYRVRGKVVPLRDKNGNIVYEKTAKGKIRVKAKHVSQGNSIRGAIHDQSFYGKIEKWKDDGSHDKEELFVIRRKLEFKAGNVGSGFKSWDDLEKQMVDKKLFKKFKAQYPEGTPFKDACAEGFYTYIAENGVRHKVKVRHVRCLAITAQPLKKHIFQPQHSDKVQYYYVSPGEAYGVFEYVSKDGKRLYESDNLFTLSTKMKSGVLTETPCPKYIIDKKGKEYVHTRTILKDATILIYPSSEHAEGQYDLDASTISKRLYRINTIEMQKKRLTLTRHNLVKSCTVSNPINDSNFSDLPEGIRMSITKLNFLLLGTDFDIIDGKIVPTKND

SEQ ID NO: 23965 - protein, 1512 aa, unidentified
  REGION 1..1512: note = Cas Enzyme sequence
MKKILGLDLGTNSIGWAVVERGDNNGRIIKSGSRIIPMDAATLGDFASGNTKSQTAERTAKRSARRMRERFLLRRERLHRLLHLLGFLPKHYEEKIGWDLDNDSKHYGTFLENEEPKIAWMRNEEKKYEFIFQSSFHEMLEDFKKYHPEILYDDKKIPYDWTLYYLRQKALSQPIDKEELAWIILNFNQKRGYNQQRDEVLEASDDKKEEYMCLTVLSVTPDTDAKGKDIWYNIRFENSDIVYRRKSKYSLNWIGKKRNIIVTTKLDEDGNPKLKKDGSIDYSVKSPNDDDWALQKIKTEQDLKASRQTVGQFIYAALLTNPSEKIRGGIVRTIERDFYKEELEKILQKQSEFHTELKDRSLYEKCINELYRNNEAHRNNIAKNDFIFLILEDVLFYQRPLKSKKSLIDDCPYESHQGIDKETGEICTYPLKCIAKSNPYFQEYRVWKFMSDLHIIANTKEIDGHIHTDVDVTCEFLPDNESWSNLFIWLNDKGHITQSDILAYLGIKKKEQSKYRWNFVADKHYPMNATRHAILNRMKDDELLSRELEQAIWHLLYSTTSKAEIDKSLSPSDTPSCIYTKLIEAGLSEESIEKIKTIKLPDEGYGAYSEKAIKKLLPLMRCGKLWDEKGIHPSTLQRIDAFSKGEGMDAFSENVNLRLSSMSGIDSFQRLPEWLACYVVYGKHSEANDIVKWKSPDDINIYLNNFKQHSLRNPIVESVILETLRVVRDLWKRYGDIDEIHIEMGRELKNPSDKRAQITKRVLENENTNIRIKTLLAEFLAGEYKIENIRPHSPSQQDLLRIYEEDVLAHNEPDDEIKDIINSLSNPTKQPTRTQVLRYKCWLDQKYCSPYTGQPIPLSRLFTSDYEIEHIIPQSRYFDDSFSNKVICESEVNKLKDNQLGYEFIKQHHGQTVQLASGKMVRVLEVEHYEQLVKDNFAQSKRRKLLMDDIPVEFIQRQLNDSRYISKVIKGLLSNIVRTTDEDGNLEREAISKNVITCNGSVTTKLKRDWGLGEVWNYIILPRFQRLNELTGQNCFTTFNTHGNEIPAMPLELQKGFSFKRIDHRHHALDAIVIACTTREHVNLLNNEAALPEHQEMKHALSHKLRRCEEIVINGKKRKIFKEFIMPWTSFKNDTLLSLQQIVVSFKQNLRVLNQATNLYTKYENGQKTLSAQHSSDHFAIRKSLHKDTVFGHVNLQRKTTIKLKDALKDVNRIVDKRLKRKIKELRAKHYNDKQLLVYFKDYAYEWKGYDFNKVEVFYFTDDKEPMVATRFCNDLVSIFSGKTKKQDVEKVIAQITDTGIQKILTNYLNENLDKIEYAFSAEGLEQMNENIVQYNNGKQHKPIYKVRLTETLGQKFQIGLIGNKAVKYVEAAKGTNLYFAVYQNEEGSRAYTSIPLNIVIERLKQHLSPVPERNDKGHNLLFYLSPGDLVYVPTVDENKFTIDTIVNNRIYKFISGSGCQAFFVPYNIANPILQTTELGSNNKSERAWTNEMIKEICLPLSINRIGEIKLK

SEQ ID NO: 23966 - protein, 1379 aa, unidentified
  REGION 1..1379: note = Cas Enzyme sequence
MEKTLGVDLGTNSIGLTLREGELFSWYGVYTFRKGVGEGKSGEFSFAAERTKHRSSRRLYNARRYRKWETLKVLIENGYCPLSLENLNKWKNYSKGIGRIFPVNDKEFQDWIKLDFDGDGISDYSSPFQLRRLLINEKVDLSIPVNRYKVGRALYHIAQRRGFKSSRKTGANEKTAVYKGSNETKTIGRNEYESLIDEQRSLGAAFAHLEDIGIRVRNRYTLRSDYHTEVKKIMNFQEIDVANFREDIFKAIFFQRPLRSQKGLIGKCTLEPNKPRCPVSHPKFEEYRAWSFINNIKYKNEDNNQFEPIPLELKQKVYDEKFFYKSKKEFTFSDIRKFIKQNGGKNWELNYSSKMDEISVPSCFVSARLKSIFGNNWKNFRKSIIKKDKKGNEFNVNYTIEDVWHILFSYEDEENFTDFLSATLDLKDEQIKELLILFNSFPVGYANLSLKAINNILPFLRQGFIYSEAVILGKIPEIIGKELFEDNKEELLEAIQKQVEVIRYEKVLINITNNLIFKYYALDFDKRFGWKNTSYQLDESDVKDVRETSIEQFGEKTWEKLNEEYKAHLIADVTKMYQQFFLSSKREHFKQLHLVNHVKQFIADNFVVSEKQLNKIYHPSQIDIYPKKENQQFLLSPKTAAFKNPMAYKTLFKLRDVINYLIETEKIDEETRVVVEIAREMNDSNKRWAIEKYQRDREAENREFANAIAELIKDPNFNGVADPENSTDNEKFRLWYEQTENPEEIIKEIQNIDKDKKLSVSEKDIQKYRLWKEQNCTCIYTGKIIKLTDLFDKNKIDFEHTIPRSKSFDNSLANMTVCYADYNRNLKKNRMPTELPNYEEDAYGYTAIKPRLENWEKRLDELFRQIDFWKFKSKTATDKASKDEAIRQRHVRQMQYDYWKNKLDRFTRTEIPQGFINSQLTDTQIITKYAFHYLKTVFSKVDVIKGTNTAEFRKIYGLQPKDEVKNREQHSHHAIDAAVLTLIPSSRKREEILKISYEYEEANAGKHYHIKPFTNFNHSMIENIKTHILINNIADKDETLTPGRKIVRKRGKVVWIDKENHIPKIAQGDSIRGELHLQTYYGKIKIAAKDENGSLVRNENGDVTYNQIDGKDEMWMVLRRPIDKVNFATDIIVDNHLANHLRKQLENGVKQHELKDFQGNPLRHLRCRVKAARGFMNPNNATPVKEQVYKSTKEYKSYIWADSGENYIFGLYENEKGDRDVISVNKFETAQFFSQAGLPKDKNDLFKQKEPVVIKNQEAKLIHIFEPGQKVIFYNSKDELNDIQNDSKEIAKRLYFIKRLYQASVGNILFQHHLEARNDDELTRDFPKEIFRSAGKDGFSKYQEDFIAPRILFKPTKPNFIIERKDFDMKLDGTIIFKF

SEQ ID NO: 23967 - protein, 1469 aa, unidentified
  REGION 1..1469: note = Cas Enzyme sequence
MKTILGLDLGTNSIGWALVEQDFENKKGKILGMGSRIIPMSQDVLGEFGKGNSVSQTAERTAYRSSRRLRERYLLRRERLHRVLNILSFLPEHYASQIDFEKCLGKFKQESEPKLAYKNKEFIFKMSFNEMLADFHQYLPQILVNEKGVPKLIPYDWTIYFLRKKALTKKIEKEELAWIILNFNQKRGYYQLRGEEEEEDNPNKLVEFHSLRITDIIADETQKNKTDVWYSLVLENGWVYRRQSKTPLFDWKGKTRDFIVTTDLNSDGTIKTDKEGNEKRSFRAPSEDDWTLLKKKTEQEIDKSDKTVGVYIYDSLLKNPKQKIKGKLVRTIERKFYKEELRKILKKQIELQPELFTTDLYDDCIRELYRNNEAHQLLLSKRDFIHLFLEDIIFYQRPLRSQKSSINNCSLEFRTYKDENGIKRTEHLKAIPKSNPYYQEFRIWQWIYNLSIYRKDDDTDVTAEFLNGLAERENLFDFLNNRKAIEQKLLIKYFLEHKGLKGKPLTIEIGKYRWNYVEDKEYPCNETRTLIRTKLEKVKNISDGFLTKEMEQSLWHLIYSVTDKHEYEKALKSFTFKHNLDETSFVDAFKKFPPFKSEYGSFSEKAIKRLLPLLRHGKYWNWDNIDKKTQYRINQIIDAEVNDEIKQIVRDKADKHQLREKAEFQGLPLWLSQYIVYDRHSEAAVSGKWNSSKDLEDYLKEFKQHSLRNPIVEQVITETLRVVKDIWTKYGNGTKNFFDEIHIELGREMKNTAEDRKEMTKRMSDNENTNLRIKALLAELKNDPLVENVRPYSPMQQEILKIFEDGILNSDIEIEDEILKISATAQPSSADLKRYKLWLEQKYRSPYTGEIIPLTKLFTPEYEIEHIIPQSRYFDDSLGNKVICEAAVNSLKDNQTGLEFIKNHRGEKVQVGMGRSVQILDVKDYENFVKQHFVKNRSKRNKLLMEDIPEKMIERQLNDTRYVSKFICNLLSNIVRGEKNDDGVNSKNIIPGNGKITSELKQDWGLNDIWNELILPRFERMNHLMNTTQFTVWNELHQKFLPTVPLELSKGFSKKRIDHRHHALDALIIACATSDHVNYMNNEHALRKGKTKDEKQKIRYDLKTKLCDKRYNKNSNKDYEWIFKKPWNSFTIDAKNILEHIVVSVKQNLRVINKATNYYEKWVAKNGIKVKEKIEQKGSNWAIRKQLHQETVSGKVLLSRIKIPSGKILTATRKHLDTTFDFDKIEKITDTGIQKILRNHLKSKENNPEIAFSPEGIENMNKDIAILNENKFHQPILKVRAFEIGSRFILGNKGNKKSKYVQTKEGTNLFFAIYQDEEGKRNFETIPINEVIEHQKWRASLTKEIQAQTSRFPLKKEKGEFLFCLSPDDLVYVPTIDELNNNSPIDFANLSKDQKNRLYLVNDFSSTCYFRPNRLAKAIRPKEVDMNYDKKKEKVTGSFDTKTASLEGNQIKDICIKLRIDRLGNISKA

SEQ ID NO: 23968 - protein, 1532 aa, unidentified
  REGION 1..1532: note = Cas Enzyme sequence
MRKILGLDLGTNSIGWSLIQHNFVKKEGNILGLGSRIIPMSKDVLDKFGSGQSHSQTAERTGYRGTRRLYQRDNLRRERLHRVLNILGFLPEHYSNAIDFDNKPGQFYGDKEVKLNYQQVKNNSIFTYEFIFINSFYEMLAEFKEKHPNLFNKKTNGEETKIPYDWTIYYLRKKALKEKITEQELAWIILNFNQKRGYYQLRGEEEETDTDKQKEFCELIVREVIDSGEEVKGNKLYNVIFENGWEYDKQITKPKDWLNKSKEFIVTTSTTKKGEIKRTFKTVNSEEDWIAIKKKTEQDIKKTDKTVGQYIYESLLENPKQKIRGKLVKTIERKFYKDELKYILVKQVQLHDKLKDKKMYKACVEELYHRNEAYKKSIINKDFAYLFIEDIIFYQRPLKSQKSNISGCAYETRTYKKIVDGKEVTETKAIKSIPKSHPLYQEFRLWQFLQNLKIYQKEAFINGKPTIDLNVTDTILENEDVWIELFDYLNTRKDVEQKHVIDFLVKQERIAKQEKDNYRWNYVEDKTYPANSTKAQFLSRLKKVENLDLNYLLTEEFEQGLWHIIYSVSDKIEFEKALKKFAKRYNLDVDSFFESFRKFPPFDSEYGAYSLKAIKKILPLMRRGKYWKREEISNDVLYKADSIKERLESVGFQKTKIDETVVDDEVQKQVLKSFADFSDKSMIQGLNTYQACYLVYSRHSEAIETSKWNAPSDIDDYLKNFKQHSLRNPIVEQVVTETLRVVRDIWSYYGNGDKNFFDEIHIELGREMKNPANIREKISKRQQENENTNQRIRKVLTELMSDSAVEGDVRPHSPSHQEILKIYEEGVYQNPDTNFSKVSPEEIDKIRKSNSPTLSDIKRYKLWLEQGYRSPYTGKIIPLGKLFTTEYQIEHIIPQARYFDDSLSNKVICESEVNQLKANMTAYEFIKNKGGSIVDLQHGETVKLLDLESYEQACNQYYKKNKAKLIKLLSEDIPDGFIERQMNDTRYISKLVKGLLSNIVKDEDEQATTSKYLISVTGAITDKLKQEWGLNDKWNEIVADRFKRMNELTKSQEFGYFDQSINTFRTLVPDELQKGFNKKRIDHRHHALDALVIACTNRRHIQYLNGLNNEKENYALRDSLLVKNQNGYYTRVFQMPWQNFPTTVKNSLSKTVVSFKQNLRVINKTTNKTWQWVEKNGKLKKQLVKQTKGDSWAIRKPMHKETVSGKVNVRICKTVSFATGIKEWDSLVDKNLKGILKRLIAEGKDKKAIDKYFKDHPYQQEGKTVKQVEAYTYTSNATATRTLLTESFTQKQLENVTDSGIKKILENHLKNYIDEMGNEHFDLAFNSDGVAVLNENIIGLNGGKKHQPIYGVRVYEEGSKFNVGYTGNKASKYVEAAKGTNLFFAIYWNEEMQKREYETIPFNVVIEHQKQVAHLPKEERTLVPINNEKGQFLFSLSPNDLVYVPSEEEIENPSLVNFNSMTDDQVKRIYKAVSSSGSQCFFIQGCVANAIANKVEFSALNKMEKSIDDIMIKDVCWKLEVDRLGNITKLIR

SEQ ID NO: 23969 - protein, 1434 aa, unidentified
  REGION 1..1434: note = Cas Enzyme sequence
MSKIVGFDLGTNSIGISIRNRDKGSDIKDQLEYFSSIIFKSGVGKGKTGEFSYAAERTKKRSVRRLYQSRKYRIWATLELLIENELCPLSIDNLNRWRIYDKTKGLKREYPVDDIRFEQWVRLDFNGDGVADYSSPYQLRAELMERQYDFSLEEDRFKLGRALYHIAQRRGFKSSKGETIKEQEKNEIVDGKDCDIDMSAELKKSEEKKSGQLVEYMSQHNLPTVGCAFYYLEKSGIRVRNSIYQAVRSQYKDEIKAIFSFQNGLDNNSDLFKHLISEKKGEGTIFYKRPLRSQKGQVGKCTLEPNKYRCPVSHPEYEKFRALCFINSIKYGEGTKETLSLDMKKKLYNDRFLLTRSSFKFEEIRKWIEKEVGCHLAYDSKTINFKDRTNVSGCPITARLKNLLGDDWAEWLYVSKEETTDKKTGEVRKIKYDAMELWHVCFSFDDVEYVEQFANEKLQFDEADTKQLVRLFGAIQQGYSMLSLKAIRNINRFLEKGLIYSDAVLLAKLPDIFGEKWALAEENIVEQLDNLIEENRYQKLVCGIANSLIADYKSLEIEEQFANKNTDYRLDESDYNDIRKVTIACIGEKTWEKKADVEKTLFLSKVAELYQSFFASSKRDYYKLPKVSDSLAAFLKDKYPYLDEKDLRKIYHPSMIEFYAPSKPEIVEDGRCLKLLGSPVIGALKNPMAMRVLHTLRKQVNALLKAIDEDGNALIDEDTRVVVETARELNDANMRWAIEAYQREREKENKEYREIIKEYYPNREIKDDDVDEVRLMCDQCEIIEPGVEQVKTKKQKEANKDVYYKKDVTKYRLWLEQGCRCIYTGKIINISNLFDDNAFDIEHTIPRSISFDDSLENLTVCDAHFNRTIKKNQIPTQLSNYEEILRRIQPWIEKVEQLKDNVDYWKAQAKRAQDKDRKDQCIRQRHLWQMELDYWQNKVNRFTMTEVTSGFRNSQLVDTRIITKYAYHYLKTVFNKVEVQKGSVTASFRKMLGIQSLDEKKSREKHSHHAIDATMLTLIPTAAKRDKMLELFYKIQEKKKLNEETQYLEFELKKEINDCGFGKNVSEVVPFIEDNILINHVSKDQTLVPSHRRKRIRGKVVWKTDEQGNVVYNEDGKPEPKEWVTGDSIRGQLHGETFYGAITQAEIDETGKMLRNEEGNIVSGGTVYYVVRRELKYKASSVDAGFKDWAELENVIVDKDLFAIMKGQFAEGISFKEACSNGIFMYKKNKNGVIDYTEGCKVNRIRHIRCFTSVKNPLKIKGQTCLSKKPYKQYYYAEMGDLYVMCKYENAERTEKEYHIWSLFDISNNREAGIEDVPNSLLSKKNTMLQLTQQIKTGDMLLLYKESPQELLDLDRETLSRRLYVVRGFENPSLIKLVRHVNAQPDKDLGKGEAIKDFSRMPEKIRCGINTLKYLVKEVDFCLTPAGIAFKKTI

SEQ ID NO: 23970 - protein, 988 aa, unidentified
  REGION 1..988: note = Cas Enzyme sequence
MLLWHILYSVEDKIEIGKALKKFAEKNDLPDSFAEVFGKIKPFKKDYGSYSEKAIKKLLPLMCMGKYWDADGIDAKTKERIDKILTGECDKNIKNRVREKAINLSDISHFKGLPVWLACYIVYDRHSEAKEISKWKKPEDIDIYLKDFKQHSLRNPIVEQVITETLRSVRDIWKQEGQIDEIHLELGREMKNPADKRKKMTERILENENTNLRIKALLMEFMNDPEIENVRPYSPSQQDILRIYEENALDNLTKEDKDFDFVSKISKTAQPSKADIIRYKCWLEQKYRSPYTGEMIPLAKLFTSAYEIEHIIPQSSYFDDSFSNKVICEAEVNKLKDRLLGYEFIKAHHGEKVQLSQSKTVEILSVEAYEKFVKDHYSTNRTKMKKLLMDDIPDGFIERQLNDSRYISKVVKGLLSNIVREKLENGEYEQEAVSKNLISCNGSITDRLKKDWGMNDVWNSIILPRFQRLNELTGNECFTTTSAEGHLIPQMPLELQKGFNKKRIDHRHHAMDAIVIACATRDHVNLLNNEAAHSKHNANRYQLQRKLRRFEKMEIDGKEHEIAKEFLKPWDSFTTDAKQALENIIVSFKQNLRVINKTTNFYQHYDETGKKVLVPQKKGDNWAVRKSMHKDTVFGEVNLRKVKAVSLVEALKKPERIVNKEFKQKVRELLAEGRDAKFIKKYLEENKDIWSDVNVSKIDVYYFTKETNERFFATRKPLDTSFDKKKIEDSVTDTGIQKILLAHLTAKGGNPELAFSPDGIDEMNRNIVALNNGKFHQPILKVRVYEKADKFAVGQKGNKASKFVEAAKGTNLFFAIFVSEKLNKETGEMDSVRSYCTIPLNVMIDCQKKYGSQWQNNIESFLKEKEFVANDAKLLFILSPNDLVYLPTKEEKRNGILEIDRKRIYKFIDPNSNKGNFIPYSTANVIFSVNFTDQKKRGISYSIQDEFGIGSQCSKNPRAITGEMIKETCIPIKVDRLGNIIELNGKRL

SEQ ID NO: 23971 - protein, 1452 aa, unidentified
  REGION 1..1452: note = Cas Enzyme sequence
MNKTIGLDLGTNSIGISVRDTDNGSDIIDQLEYFSSVIFRSGVGNGKSGEFSYAAERTKKRSTRRLYMARKYRIWATLKLLIENGYCPLNMENLEKWSKYDKAKGLKRKYPVEAEKFEQWVRLDFDGDGIADYSSPFQLRAELMERQFDFTQEIERYKLGRALYHIAQRRGFKSSKGETIKEQEKNESVESDPPDIVEAMKKSEIKKSGVLTKYMDEHNLKTVGCAYYALEKSGVRVRNSEYQAVRTQYKEEIELIFGFQDGLDQKSEFYKRLVSEKKGEGTIFYKRPLRSQKGLVGKCTLEPNKSRCPISHPEFERFRAWCLINNIRFGEDLRETLTINQKKRLYDESFLLTRSSFKFEDIRKWLEYETGKHFDYKLKTINYKDNANVSGCPVSARLRKLIGDDWETWEYKSGETKSDKKTGEVKNITYTAYDLWHVCFSFDEPDFVEEFAQTKLGFDKDKTKQLMRIYGSIQQGYGMLSLKAVRNINRFLEKGLIYSDAVLLAKLPDIFKDRWADVEDEIISELDKLIIENREQKQLLCMVNSLIANYKSLDFEVQFAYRNPDYKLDKSDYNDIKKAAVDAIGEKTWLKRTDEEKETIINQVAELYQSFFASSKRDYYKLPKVSESLAAFLKEKYHYLDEKDLRKIYHPSMIEFYAPSKPEKIEDGRCLRLLGSPVIGALKNPMAMRVLHTLRKQVNALLKATDKDGNALIDEDTRVVVETARELNDANMRWAIEAYQREREKENKEYEKILKEYFPDRIINDDDIDEVRLLCDQHEIAEVESESKKGKNQKEDTKDLYFKKDVTKYRLWLEQGCRCLYTGKMINISNLFDDNVFDIEHTIPRSLSFDDSMANLTICDAHYNRAIKKNQIPTQLANYENDANGYTAIKPRLQPWIEKVEQLKDNVAYWKAQSRKAQDKDSKDKCIRQRHLWQMELDYWQNKVDRFMMTEVTSGFRNSQLVDTRIITKYAYHYLKTVFNKVEVQKGSVTSSFRKILGVQSVDEKKSRDKHSHHAIDATVLTLVPTAAKRDKMLELFYKIQEKEKLNEETAYLEKELKKEINSCGLGGNISEIVPFIENNILVNHVSKDQTLVPSHRRKRIRGKVVWKTDEKGLKVYDEEGNPVPKEWLTGDSIRGQLHKDSFFGAIKYPKINGEGLPIKENEHFVFENDGEGNPIITMVIREDIKEFKKESDISKIIDPYVRETIETTIKKRKAEGVSFDKAINEPMWLLDKNGNEIKYDKNGRLLSPIRHVRCRVAAGRGFFTKDKAIRVKAQTYPSKYDYKNLYYAQNDGNYLCLLYEGVKKGKIERKFRFLNYFEVASMSIKDVKDLMREPYFNKIEEKNFTLNLTAIIKAGTRVLMWTESPEELTCLSDRELSRRLFIVYKFNLKGANCIYLQNHIEARNEISKDEDFTVYDSENYQARLTLVANGFNCLIEDRDFVFDETGKIELL

SEQ ID NO: 23972 - protein, 1200 aa, unidentified
  REGION 1..1200: note = Cas Enzyme sequence
MKYILGLDPGIASIGWALIQEAENADEKSRIIASNVVKVDFDNFTFINGKGKISDGNAIKMYQKGYTVSPNLVRRQKRGAHRNLQHFKLRRSALIALLRENGFIDDDTLLCEDGKGTTYETLTLRSKAASEEVSLSELARVLLMINKKRGYKSSRKGEVDADEEDMGEYLAAITGRSKLLAENHQTVGQYLMSQIALHPLQGIKRQIFYRKDYEDEFEQIWKTQIQYHPELTRKLKKEIKNRIIFYQRPIASKKDELSICELECKEIEIEKDGKKKTIKTGSKVCPVSSPLFQEFRMWQKLNDVILTNINTLEKRYLSLEEKEMLASELSIRPRLTKRDIIKMLVGKQAKYFDLNFDELIGNETQSRLVNAYLMILELTGHDKIDVKKSKAVDVVEAIRQVFAGLGYNTDAVDGQVSFQQDIYLQPYYRLWHLLYSFPGDNSRSGSDTLVQRVKEFFDFDNDEYAKAIADIKFTDGYGNLSAKAIQKILPKMKEGYQYYDACEMVGYKHSKRSLTKEENDNRALQKYLDFIPHNSLRNPLVERILNQMISLINSLIEEYGPTYGTFDEIRIELARDLSKNAESRKKMTQDIENNKNERETCRKELIETLNERGYKVNYVSENDILKYRLYKELAPLGYKTLYSKTKVDLVDLIIHRKFDKEHIIPKAKSPSNAFSVLTIELSSINEEKRDMTALDYVKWKYGEEEAQQYIARVNDLFKLKAISKAKKDNLLRTAAEIPDEPLNRDLGLTQYINRKAYEILSAITRKVVPTTGSITSRLRDDWQLVDVLQELVWDKFDKLGLIDSYTDKDGRTVRKIKEEAWTKRNDHRNHAMDAITVAFTKQAYINYLNSLNAEGEKREQLMKMRQKNLHRDKQGNWRFNPPMPLGDLRAEVKHQLENIIVYQKPASSAVSPNQNVTKTKKKKEGNRQVQLTPRGKLHDDNPYGSIKEIIPGVGEVLVFTRRIEVNESLKVEDVVDKGVQNILRKRLLEYNNDPKKAFTNLDENPIFFNQDKDIRIKKVVVRINKDLKPIHKKKNHKGELLLDKNGNVQASDYVLTNNNHHVAIYEDEHHELHEVVVSFFDAVDRGIHNKPVIERTLNADKGWRFLFSLQQNDCFVFPDVGFNPSEIDLTARENYALVSPHIFKVQTISKGDYRFRHHHDATKDYNSSLKNLTWKRIRTLNDLRGLVKIRITKTGHIEYV

SEQ ID NO: 23973 - protein, 1544 aa, unidentified
  REGION 1..1544: note = Cas Enzyme sequence
MKKVLGLDLGTNSIGWAVVNAEEANRENETTYLKPTSISAAGSRIIPMSADILGNFDAGNSVSQTAERTGFRGVRRLHERNLLRRERLLRVLKLMDFLPEHFANQINEYGKFIDYGEPKLAWRKDENGKYDFVFKDSFNEMLADFAANQPQLVADGKKVPYDWTIYYLRKKALTQRITKEELAWILLQFNQKRGYYQLRGEEEEQEGKVVEFLAQKVVSVEATNEKKGDEVWYNVHLENGMIYRRTSKEPLDWVGKVKEFIVTTDLEKDGTPKKDKEGNIKRSFRAPKEDDWTLVKKKTEADIENSQKTVGCYIYDTLLQNPNQKIIGKLVRTVERKFYKQELELILRKQQQLIPELQDDILYKRCIEELYPNNDAHRNNIAKPDFVNLFINDILFYQRPLKSKKSLIGNCPYESHFDKEGNEHPVKCIAKSNPLFQEFRLWQFVQNLRIYQRERLVSDGQLDLFGNASAGKLQTDVDVTNEFLKTEDDYVNLFDWLNDRASIKQDTLLNSYFRIKKQRGQEQYPYRWNYVEDKEYPCNETRAIILSGLSKCNIESTFLSHETEMHLWHILYSVEDKTEIEKALKKYTEKNNLPDSFAEVFGKIKPFKKDYGSYSEKAIKKLLPLMRMGKYWDADDIDAKTKKRIDKILTGEFDETIGMRTREQIKAYEEKTGNKLDDISSFKNLPIWLACYIVYDRHSEAKEIEKWKKPEDIDTYLKAFKQHSLRNPIVEQVITETLRTVRDIWKQEGQIDEIHLELGREMKNPANKRKKMTERILENENTNLRIKALLMEFMNDPEIENVRPYSPSQQDILRIYEENALDNLTKEDKDFDFVSKISKTAQPSKADITRYKCWLEQKYRSPYTGEMIPLAKLFTSAYEIEHIIPQSRYYDDSFSNKVICEAEVNKLKDRLLGYEFIKAHRGEKVQLSQGKTVEILSVEAYEKLVKDHYSSNRTKMKKLLMEDIPAGFIERQLNDSRYISKVVKGLLSNIVREKLENGEYEQEAVSKNLISCNGSITDRLKKDWGMNDVWNSIILPRFQRLNELTGKDCFTTTSAEGHLIPQMPLELQKGFNKKRIDHRHHAMDAIVIACATRDHVNLLNNEAAHSKHNANRYQLQTKLRRKDEEGHYKEFLKPWDSFTTDAKQALVNIIVSFKQNLRVINKTTNFYQHYDETGKKVLVPQKKGDSWAVRKSMHKGTIWGEINLRLKKEVSLNEAIKAPRTIVNKEFKQKILELLTEGRDAKFIKKYVEENKDVWSDIDLKRIEVYYFTKETKDRYFATRFLNDLVTYLAGIKEYDKALKKIEGVTDTGIQKILKAHLQAKDNNPELAFSPDGIDEMNRNIIELNNGKFHYPIYKIRRFEKGNKFAIGKKGNKSSKFAEADDGTNLFFAIFASEKLNKETGEMESVRSYCTIPLNVMIDCQKKYGSQWQNSIESLLKEKDLVANDAKLLFILSPNDLVYLPTKEEIRNGITVIDRKRIYKMVSSSGYQCFFIDEKVAKAIVDKVEFTSLNKAERAITGEMIKETCIPIKVDRLGNIIELNGKRL

SEQ ID NO: 23974 - protein, 1541 aa, unidentified
  REGION 1..1541: note = Cas Enzyme sequence
MKKILGLDLGTNSIGWAVVNADETNRDNETKYLKPTEISAAGSRIIPMSADILGEFEKGNSVSQTAERTGFRGTRRLLERNLLRRERLLRVLQLMNFLPEHYATHINRYGKFTDDSEPKLPWCKNEQGKYEFIFQESFNEMLADFTKYQPQIVADGKKVPYDWTIYYLRKKALTEAITKEELAWILLQFNQKRGYYQLRGEDEEENTTAKTRQYFDRQIISDIVDTGQEYKGLKVLTVILQNGDKGKVFKKEVPNWIGQEKSIIVTVDIDKDGHDKFDENGQLSRKFKIPTEAEWDSEWKLIKLKTEKDLDNSHKTVGYYIYDNLLQNPNQKIIGKLVRTIERKFYKEELRLILEKQKEFIPELRDENLYLECINELYQINEAHRNNIAKPDFTNLFINDILFYQRPLKSKKSLISDCPYESRFDKDGTEHPVKCIAKSNPLFQEFRLWQFVQNLKIYQREKIVSDGQLDLFGNQNTGKLQTDVDVTAEFLTTEDDYVKLFEWLNDRANIKQDTLLNSYFKIKKAKGQEKYPYRWNYVEDKEYPCNETRNALLSALDKCGMDKEILSHEIEIQLWHILYSVEDKIEIGKALETFAKKNSLESNFAETFKKIKPFKKEYGSYSEKAIKKLLPLMRMGKYWNADKIDDNTKKRIEKIISGEFDENIMNRVREKAITLTELKQFKGLPTWLACYIVYDRHSEAKEIEKWEKPEDIDNYLKHFKQHSLRNPIVEQVITETLRTVRDIWKQEGQIDEIHIELGRDMKNPADKRKKMTERIQQNENTNMRIKALLMEFASPEMEIDNVRPHSPSQQDILRIYEENALDNLSKDDKDYDFISKISKTAQPSKSDIIRYKCWLEQKYHSPYTGEPISLSKLFTSAYEIEHVIPQSRYFDDSFSNKVICEAEVNKLKDRQLGYEFIKNHHGQKVQLSLGKTVEILSVDAYERFIKENYSNNPPKMKKLLMDDIPDGFIERQLNDSRYISKVVKGLLSNIVREKLANGEYEQEAVSKNLISCNGTITDYLKKDWGINDVWNRIILPRFERMNKITGKDCFTTTTTEGHLIPNMPFELSKGFNKKRIDHRHHAMDAIVIACTTRDHVNLLNNEAAQSKNNANRYQLSRKLRRYEKVTINGKEEREVPKKFIKPWDSFTTDVQKSLENIIVSFKQNLRIINKTTNHSEHFEDGKKILVKQKKGDSWAIRKPMHKDTVFGEVNLRFIKAVSLNEALKHPERIVNKDFKLKIRELLSKGKDAKFIKKYLEENKDVWSDINVSKIDVYYFTKETKERFFATRKSLDPSFDKKTIEDSVTDTGIKKILLAHLASKDNNPELAFSPDGIDEMNRNIIALNNGKFHQPIIKVRKYEKADKFAVGQNGNKSKKFVEAAKGTNLFFAIFVSEKENKETGEIEKIRSYLTIPLNTIIDCQKKFGTKWNDNIENYLKDKELVTTDAKLLFIISPNDLVYLPTKEEKDGIQFINKKRIYKLVSCTGNEGHFIPEIIASPILQTIELGSNNKAQKSWTGEMIKETCVPIKVDRLGNIIEINGKKL

SEQ ID NO: 23975 - protein, 1396 aa, unidentified
  REGION 1..1396: note = Cas Enzyme sequence
MKKILGLDLGTNSIGWAVVNEAEKEGEKSSIVKLGVRTISFDNFVNTVSGKTCMDAVADFNGGKGISCNAGRTQGRSMRRNLQRYKLRRDFLRKTLKENGFIDDATILAEKGNNTTFETYRLRAKAATEEISLTELARVLLTINKKRGYKSNRKAKSSDEGSLIDGMAVAEKIYKEGITPGQFVLSLYNQGKRYEPDFYPSDLQAEFDKIWNFQKNFYPEILTDSLKSSLLGKNKSVTWAICKSPFNIVGIKRNTKGFDQKKEDYKWRTQAVSEKIGLEELAIVLQNINGQKSGTSNYLGNIGDRSKELRFNHLTVGQFQMNELAKNPNYSLKNQVFYRQDYLDEFETIWETQAKFHPELTPALKHEIRDVVIFYQRPLKSQKNLISVCELEGRKVSRTTDGKKKEVLSGPKVVPTSSPIFQEFRIWQVLNNVMMTSKETGEYCTLKQDEKEKLFAELNIKEQLSKADALKVLFGKEYREYDLNFDKLEGNRTQAKLFSAYSKIIEMNGLGENNFSKMNARDVHKTIHNAFEQLKIKTDFLTFDATLANEEFENQPLFKLWHLLYSFQGDKTPTGNGHLIQKIQDLCNMDHESASVLANVTFEDAYGSLSAKALKKILPFMKQGQMYSEACSSAGYKHSKRSLTREELANKVYKDHLEPLPMNSLRNPVVEKILNQMVNVVNTIIDTYGKPDEVRIELARELKKNAKEREELTKSIKDISTKYDEYRTILMKEFGLEHPSKNDLLRYRLYRELESNGFHTLYSNTYIPAEKLFSKDFDIEHIIPQARRFDDSFANKTLEVRQINIEKSNSTAIDFVLKKYGENEVEQYKSRINKMYSEGVIGKAKYNNLLMHETDIPSGFIERDLRDSQYIAKKAREMLEDVVKFVVSTTGSITDRLREDWQLVDVMQELNWDKYNRLGQTETYKDKDGRTIRKIIDWTKRNDHRHHAMDALTIAFTKRSYIQYLNNLNARVPKSEQEYIDLADYDLSNINPADIKRIEASIERKELYRNEKGKLCFIPPMPLDEFRAKAKEQLENTIISIKARNKVVTRNMNISIGKNGKINHQQTLTPRGQLHNESVYGSYQAENVKQERVDAKFTAKKIATVCNSEYRNALIERLKKFDGDSKKAFTGKNAISKHPIFLDEMHIRKVPEMVTTKTYERVYTIRKAISSQNFKDAKTIDKVIDEKIKTLLLERFAEYNNDAKKAFDNLMDNPIWLNKEKGISIKSVTIRAVNNAVALHNGHDFVNTSNNHHVAIFRDSEGSLQEHIVSFYEATQRAVKGLPIVDKDYKKENGWQFLFTMKQNEFFVFPNQETGFDPSKINLIDQKNYALISPNLFRVQKFTTKDYFFRHHHETILNDNKALLGITWKRGGLGLLNGVVKVRINHIGKIVSVGEY

SEQ ID NO: 23976 - protein, 1547 aa, unidentified
  REGION 1..1547: note = Cas Enzyme sequence
LIAPNISKEICTFVAKLLKTHITMKKILGLDLGTNSIGWAVINAEEVSRENGISYLKPYGINSAGSRIIPMSADILGDFEKGNSISQTAERTRLRMVRRIHERSLLRRERMLRVLKTLGFLPTHFANKIDDFGKFIDESEPKLAWIKRENGEYSFLFQDSFKEMLKDFAIHQPQLVADGKKVPYDWTIYYLRKKALNDRISKEELAWLLLQFNQKRGYYQLRGEEEEEDNTKRVEFLAQKVVRVEATNEKKGEDIWYNVYLENGMIYRRPSRYKLDWAGKVKEFIVTTDLEKDGSPKKDKEGNVKRSFRMPKEDDWTLIKKKTEFDIENSNKTVGCYIYDTLLQKPDQKIIGKLVRTVERKYYKDELIQILSIQQELIPELKDTELYKRCIEKLYQNNETHRSNLARPDFVNLFVNDILFYQRPLKSKKTLIDNCPYEYRKDKDGNIYPIKCIAKSNPLFQEFRLWQFVQNLRIIQRERFVSDGQLDLFNNVATGKLQTDVDVTAEFLKTEDDYVNLFDWLNDRSSIKQDTLLNSYFKIKKEKGKDHYPYRWNYVEDKEYPCNETRASMINGLEKCNISSDILTHETEMALWHILYSVEDKIEIGKALRTFAEKNHLGNAFIEVFCKMKPYKKDYGSYSEKAINKLLPLIRMGKYWKEENIDAKTLERIDKIITGEYDETIKNRVREKAISLTCVEQFKGLPIWLACYIVYNCHSEAKEIEKWEKPEDIDCYLNSFKQHSLRNPIVEQVITETLRTVRDIWRKEGQIDEIHVELGREMKNPADKRKDMTARIQQNENTNLRIKALLMEFLNPELGIENVRPYSPSQQDILRIYEENALYNLTKEDTEYEFVSKMSKTAQPSKSDVIRYKCWLEQKYRSPYTGRMIPLAKLFTPAYEIEHVIPQSRYFDDSFSNKVICEAEVNKLKDRQLGYEFIKNCAGQIVQLSQGDSVKILSVEEYEKLVKDFYASNRPKMKKLLMEDIPDGFIERQMNDSRYISKVVKGLLSNIVRVKESNGEYEQEAVSKNLISCNGSVTDRLKKDWGMNDVWNSIILPRFQRLNELTGTKNFTTLNREGHEIPNMPLELQKGFNKKRIDHRHHAMDAIVIACATRDHVNLLNNEAAHSKHNANRYQLQKKLRRFEKAINGYGKEIEVAKEFLMPWQSFTTDAKQVLENIIVSFKQNLRVINRTTNNYLHYDENGKKKYQKQTKGDSWAIRKSMHKDTVFGEVNLRRKKSVSLNEALKKPECIVNKDFKRKVKELLNEGRDAKYIKKYIEENKDIWSDIDSAKIEVYYFTKDEKKENGEPKERYFATRKPLDVSFDQKKIQESVTDTGIQKILLAHLEAKENNPELAFSPDGIDEMNRNIVALNNGKFHQPILKVRVYEKADKFAIGQTGNRSKKFVEAAKGTNLFFAVYVNADHIRSYYTIPLNIVIDRLKKNLSPVPECNEKGESLLFYLSPGDLVYILKDENDRLNNDCDISRIYKFVSGSSYQGFFIPYNIANPLLSTTELGSNNKSERAWSADGWSSDMIKEKCIPLSINRVGEIELR

SEQ ID NO: 23977 - protein, 1428 aa, unidentified
  REGION 1..1428: note = Cas Enzyme sequence
MGKVLGLDLGTNSIGISLRNEDKGGNIINQLEYFSSVIFKSGVGKGKSGEFSYAAQRTSKRSTRRLYQSRKYRIWATLKLLIENGFCPLSMEDLEKWSKYDKTKGLKRQYPIEAIQFERWVRLDFDGDGIADYSSPYQLRSELIEKQFDFTDPINRYKLGRALYHIAQRRGFRSSKGETLQEQEKAEITDIQETDITDALKKSEEKKTGKLVEYMQTHQLKTIGSAFAHLERSGIRVRNSEYQAVRSQYKDEIRQIFDFQDGLDIDSVFYKRLICETKNDGTIFYKRPLRSQKGLVGNCTLEPNKPRCPISHPEFEKFRAWCFINNIRYGDGLKESLTLEQREQLYQDKFLHTRNSFKFEDIRVWIEKRIGKHLDYNNKTINYKDNSTVSGCPISGRFKNLLGEDWENWVFISAEEKINKKTGEVKRIKYTTDDLWHICFSFDEPEYVEEFATTKLSFDDSQVKQLVRIYGAIQQGYGMLSLKATKNINRFLQKGLIYTDAVLLAKLPEIFKDKWLESEESIISQIDGIISTNREQRLLFNIANALIADYKSRDFTDQSGYKNCSYVLSDNDIKDVRNKTVAVIGSKTWANKDEAEQKEILAQIAKLYQSFFESSKRDYFKVPKVADALATFLHNTFKYLPEKDLRKIYHPSMIELYSPADYTRIEDGRSLKLLGSPVIGALKNPMAMRVLHTLRKHVNSLLKTVDENGNALIDEETRIVVETARELNDANMRWAIEAYQRERETENKEYEKIIKEYFPNRDIKDNDIEQVRLTCEQHDIPENGIPDEQPKHKKDKNVPIFKKDVTKYRLWLEQGCRCLYTGKMINIKNLFDDNAYDIEHTIPRSISFDDSLANLTVCEAHFNRSVKKNQLPTQLTNYEDIKLRLLPWFDKVEKLKDNVDFWKSQSKRAQTKDRKDHCIRQRHLWQMELDYWQNKVNRFTMIEVTTGFRNNQLNDTRIITKYAYHYLKTVFNKVEVQKGSVTANFRKMLGVQSLDEKKSRDKHSHHAIDATILTLIPTAAKRDNMLELFYKIQESKKHNLEYSFLEDELLKNRCSFNLDGNVTDLVNYIEDHILINHISKDQVLTPAHKRKRSHGKILWKKDKNGNIMFDEHGKPIPEQWITGDCIRGQIHGETFYGAITQAKKDANGTIIRKNDGSIIVGDETFYVVRKELVYKKDTNSPGFKDWAELENAIVDKDLFRIMKGQFAEGTSFKDACSKGIYMFKKGLDGTIDYSDECKVNKIRHIRCFTSIKNPLKIKRQTYISPKEHKQYYYAEMGDLYSMCKYENENGTEKEYHIWSLYDISNNRKEGIEEIPNVLLSKKEKTLYLTQIITVGDMLLLYKETKQELFEMDVDSLSNRLYVVRGFENPSLIKLVKHTNAQSDKDLGKGESIKDYNKMPEKIRCGINTIKFLKKDIDFTLSAKGIEFK

SEQ ID NO: 23978 - protein, 1223 aa, unidentified
  REGION 1..1223: note = Cas Enzyme sequence
KTEHDIDTSNKTVGYYIYDSLLSNPNQKIIGKLVRTIERKYYKEELRLILTKQSELIPELQDELLYKACINELYPNNDAHRNNIAKPNFTNLFIDDILFYQRPLKSKKSLINDCPYESRFDKDGNVHPIKCIAKSNPLFQEFRLWQFVQNLRIYQRERVFIGEQNKLATDFDVTDEILKTEDDYVRLFEWLNDRASIKQDTLLSSFFKFKKEKGKDKYPYRWNYVEDKEYPCNETKAIILNGLDKCGLNQAILTDEFETSLWHILYSVEDKGEICKALKTFAQKNNLPDSFAEVFAKIKPFKKEYGSYSEKAIKKLLPLMRIGKYWSPDLIDTSVKERIDKIIDGEYDETIKNRVREKAINLSDITQFKGLPVWLTCYIVYNRHSESNGDKWNKPEDIDNFLNGFSQHTLRNPIVEQVVTETLRTVRDIWKQEGSIDEIHLELGREMKNPADKRRKMTENILQNENTNLRIKAMLLEFMNPELGIKNVRPYSPSQQEILRIYEENALDNLTKDDKDFEFVSKISKTAQPSKSDIVKYKCWLEQKYRSPYTGEMIPLAKLFTSAYEIEHVIPQSRYFDDSFSNKVICESEVNKLKDRQLGFEFIKNHKGEKVQISLGHTVEILSVEDYEKFVKDHYSNNRLKMKKLLMEDIPDSFIERQMNDSRYISKYIKGLLSNIVRVKEANGDYEPEAVSKNLISCNGSITDRLKKDWGMNDVWNSIILPRFQRLNDITGRDCFTTLNAQGHLIPQMPLDLQKGFNKKRIDHRHHAMDAIVIACATRDHVNLLNNEAAHSKHNSNRYQLQRKLRRYEKLIIDGKEKEIAREFLKPWDSFSTDAKQVLSNIVVSYKQNLRIINKSTNHYQHYDDNGKKVYVKQEKGDNWAIRKSMHKDTVFGEVNLRFIKTVSLNEALKNPKRIVNKDFKEKVLEFITKGRDAKYIKKYIEDNKDVWSDIDVKKIEVYYFTKETNDRFFATRKPIDSSFDRKKIEESITDTGIQKILLAHLDAKGDDPEIAFSSDGIDEMNQNIIRLNDGKFHQPIQKVRVYEKADKFAVGQVGNKSSKFVEAAKGTNLFFAVFASEQVDKQTGEKKIVRSYLTIPLNVMIDCQKKYGATWRNNIEFYLKEQELIATNLELLFILSPNDLVYLPTETITETNVARIYKLVSCTGNEGHFVPASIASPVIPTTELGSNNKAQKAWTGEMIKEICIPIKVDRLGNIIELNNKKL

SEQ ID NO: 23979 - protein, 1420 aa, unidentified
  REGION 1..1420: note = Cas Enzyme sequence
MKKILGLDLGTNSIGWAVVNEAENQTEESSIIKLGVRVNPLTVDELLNFEKGKSITTNADRTLKRSMRRNLQRYKLRRSNLIEVLKERGFIDDSTLLSENGNWTTFETCRLRAKAATEEISLTELARVLLMINKKRGYKSSRKAKSTEEGQLIDGMEIAKKLYDENLTPGQLSLQLLQDGKRHLPDFYRSDLQTEFDRIWQQQKLYYPELLTDQLKEELKGRNKTQTWAICAKPFQIVGVKSSKKGQELRKENYRLRVEALAKNLGLEELAIVLQEVNGQISNASGYLGDISDRSKALYFNHQTVGQYQMAQLENNPHYSLRNQVFYRQDYLNEFETIWEMQAKFHTELTPELKKEIRDIVIFYQRPLKSQKGLISFCEFESHQIEVVIDGKKKTKTIGLRVCPKSSPLFQEFKIWQVLNNVQVWGKTTPKRFLFQEEKEKLFAELNYCERLSKAEALKLLFGSPKEYDLNYKDLEGNQTQAGLLEAYKTIIEMIGHDEFDFSKLSSAKTIEKVDEVFSGLGINTGILYFDSSLEGHALEQQPMFKLWHLLYSFEGDKSELGNANLIQKLHEQFGFDKESATVLAGVVFSDDYGSLSSKAIRKILPHLKDGLEYSVACEYAGYRHSKSSLTKEEIENKVLKDKLELLPRNSLRNPVVEKILNQMVNVVNAIIDEYGKPDEIRIELARELKKSAKEREEMTRSINETTRLHEGYVKILQGDPFKLEHVSRNDIIRYKLYEELEMNGYKTLYSNTYIPREKLFSKEFDIEHIIPQAKLFDDSFSNKTLEVRQVNLDKGNATAMDFVNEKYGAQVAEEYVARIENLYSKKVISKTKHDKLLMKEADIPSGFINRDLRDSQYIAKKAREILEEIVRFVVPTTGSITDRLREDWQLVDVMQELNWDKYNQLGLTEIIEGRDGQRIRRIKDWTKRNDHRHHAMDALTIAFTKRSFIQYLNNLNARVQKGVDDYIDLDMVELSLLDKDQRSAAVYGIERKELHRDSHGRLRFNAPMPLEEFRAEAKRQLEAILVSIKAKNKVVTQNINVSKTKNGRNKKVQLTPRGQLHLETVFGSCKRYVTKEEKVNASFDVEKINTVANKRYRDALLARLQQFDGDAKKAFTGKNSLDKNPIWLDDLHTIQVPEKVRIVTFETIYTIRKDITPDLKIEKVVDVHIRRILQERLATFGGDAKKAFSNLDENPIWLNKEKGIAIKRVTITGISNAESLHDKRDKEGQLVLDEKGSTQPVDFVNTGNNHHVAVYRKPKLDKNGQHLLDENGELQYELDERIVSFYEATSRAMLGLPIVDKEYKKEEGWQFMFTMKQNEYFVFPRYDAQGIMVFNPLDYDEAWYKNADNYATISPNLFRVQKFSFKNYVFRHHLETTIDNSGYSLRGITWIDFRSSKGLDLIMKVRVNHIGQIVSVGEY

SEQ ID NO: 23980 - protein, 1549 aa, unidentified
  REGION 1..1549: note = Cas Enzyme sequence
MKKILGLDLGTNSIGWAIVNANEETRENGTKYLKPTGISAAGSRIIPMSQDILGKFDAGNSISQTAERTRLRMMRRLRERNILRRERLLRTLKIMGFLPEHFAQQVNLYGKFIDDSEPKLAWKKKEDGSSEFLFQDSFRDMLADFAMNQPQLVSDDKKVPYDWTIYFLRKKALTERITKEELAWILLHFNQKRGYYQLRGEEEEEKENESVEIISAKILSVEKKEKDKKYEKYWYEMNLDNGMTYRASFYNDVSNWQGDTRDFVLKTTILKDGSAKNELSFLPTTGEIERMDAQRKAKMYAKIKLRTEKDIENSNTTVGCYIYNKLLQKPDQKIIGKLVRTVERKFYKDELILILNTQQEFIPELKDTELYQRCIEELYPSNEAHRNNIAKPDFVNLFVDDILFYQRPLKSKKSLIDNCPYEFHSDKDGNIHPIKCIAKSNPLFQEFRLWQFVQNLRIYQRERIVNNSQFDLFGNTPKGKLQTDVDVTTELLKNEDDYVRLFDWLNDRNSIKQDTLLNSFFKIKKEKGKDKYPFRWNYVEDKEYPCNETRAALLSGLEKCNIHTDFLTHDKEMALWHILYSVEDKAEIGKALKTFASKKGLEDSFVAIFSKLKPFKKEYGSYSEKAIKKLLPLIRMGNYWKAEAIDNKTLDRIKKIITGEYDETIKTRVREKAINFTDVCHFRGLPVWLACYIVYDRHSESKEIEKWESPDDIDHYLRGFKQHSLRNPIVEQIITETLRTVRDIWKQEGRIDEIHVELGREMKMPADKRKKQTERILQNENTNIRIKALLLEFMDSGVENVRPYSPNQQEILRIYEENALDNLTKEDTEYEFVTRISKTAQPSKSDIIRYKCWLEQKYRSPYTGEMIPLSKLFTPAYEIEHIIPQSRYFDDSFSNKVICEAEVNKLKDRQLGYEFIKNHAGQIVQLTQGGTVKIQTVDVYERFVKDHYSTSGIKMKKLLMADIPDDFIERQMNDSRYISKFVKGVLSNIVREKQENGEYEQEAVSKNLISCNGSITTYLKRDWGMENVWNSIILPRFLRLNQLTGTDCFTKLNNEGHTIPIVPFELQKGFNKKRIDHRHHAMDAIVIACATRDHVNLLNNEAAHSKHNANRYQLQRKLRRFEKIVINGKEREIAREFLKPWESFTTDAKHCLEQIIVSFKQNLRVINKTTNYYQHFDDNGKKEYTKQEDGSSWAIRKSMHKDTIFGEVNLRFIKTVSLNEAIKKPETIVNKEFKTKVKELLRLGYNAKSIQKYVEENKDVWSDIKLSKIEVYYYTNETNERYFATRFLSELVTYMDGVTKAEDAIKKIEAITDTGIQKIMKAHLLSKNNNPLIAFSADGIDEMNHNIVALNKGKFHHPIYKVRRFEKGSKFAIGQIGNKTKKFVEADDGTNLFFVVYEDTNRKRFFATIPLNLSIDCQKDSQKKWVQLLDERLRDKTPIEHLQKYQKLDIPTDVHLLFIISPNDLIYVPTREEILNGIMHIDTNRIYKAVSFNKKQCFCILNNVATPIVNKVEFSSSNKMEKTITGEMIKEICIPLKVDRLGNIIKVGY

SEQ ID NO: 23981 - protein, 1486 aa, unidentified
  REGION 1..1486: note = Cas Enzyme sequence
LDIQKKIIFAKKTTGNMKKILGLDLGTNSIGWAVVNEAENTEEKSSIVKLGVRVNPLTVDELTNFEKGKSITTNADRTLKRSMRRNLQRYKLRRDNLIDVLKSNGFIDDETILSENGNRTTFETYRLRAKAATEMISLQEFARVLLQINKKRGYKSSRKTKNTEEGQLIDGMDIAKKLYEEDLTPGQLSLQLLLEGKKHLPDFYRSDLQSEFDKVWNFQKQFYTFLTDELKEELKGKNEKTTWAICAPKKDTSNEKNDRFVWRWHETVTQWDPELSTNQTVVVEKKLVGEKRQGNLSEQKIENYQWRVKALSEQLSPEQLIVVFQKINGQINNASGYLGNISDRSKALYFNRQTVGQYQMAQLERNPNHSLKNQVFYRQDYLDEFETIWETQSKFHPELTADLKKEIRDIVIFYQRPLKSQKGLISFCEFESKQIEVEIDGKKRLKTVGCRVCPKSSPLYQEFKIWQILNNVQVIGEVIPDPRSGLFNGEESFKRGKRFLFQEEKEKLFAELNYKEKISKSDALKLLFGNQKMLDLNYKQLDGNHTQAELLKAYQNIIEATGNGDFDFAKMPSDKVLETVSQVFESLGFDTAILRFDASLEGQALERQPMYQLWHLLYSFEGDNSNLGNEKLIDKLCESYGFDRESASVLANIVFEQDYGSVSAKAIRKILPHLKDGLDYSVACEYAGYKHSKNSLTKEELANKVLKDRLELLPRNSLRNPVVEKILNQMVNVVNGIVDQYGKPDEIRIELARELKKSAKEREEMTKSINETTRLHEEYVKILQSEPFFLQHVSRTDIVRYKLYKELETTGYHTLYTNTYIPQDKLFSKEFDIEHIIPQAKLFDDSFSNKTLEARQANLEKGNATAYDYVLENYGNIGAEHYVDRVERLFADKVISKTKRDKLLMREVEIPSGFINRDLRDSQYIAKKAREILEEIVRFVVPTTGSITDRLREDWQLVDAMQELNWDKYNRLGMTEVIEGREGQRIRRIKDWTKRNDHRHHAMDALTIAFTKRSYIQYLNNLNARVQKGVDEYFDLDMVELSDLDKKDRAAAVYGIEKKELYRDGRGKLRFKPPMPLDEFRAEAKRQLENTLVSIKAKNKVVTKNVNITKSKTGKNKKVQLTPRGQLHLETVYGLAKQYATKFEKVNASFTEEKIKTVANKRLREALTERLNQFDGDAKKAFTGKNSLEKNPIWIDEYHKDKVPEKVKTVVFEPVYTIRKPISPDLKLDKVVDVGVRNVLKERLEEFGGDAKKAFSNLDENPIWINKEKGISIKRVTITGISNAEPLHEKKDKNGNLILDGQGNAQPVDFVNTGNNHHVAIYRKPKLDKDGQPLVDENGEMLYELDENIVSFYEATSRAILGLPVIDKEYKKDEGWQFLFTMKQNEYFVFPQFDEDGNMVFNPLDYDKEWYKNPNHFAIISSNLFRVQKFSYKNYVFRHHLESTIDLSDYKLRGVTWTDFRSSKGLDNILKVRVNHLGQIVSVGEY

SEQ ID NO: 23982 - protein, 1513 aa, unidentified
  REGION 1..1513: note = Cas Enzyme sequence
MKKILGLDLGTNSIGWAIVERKDNDGRIIKSGSRIIPMDAATLGDFASGNTKSQTAERTAKRSARRMRERFLLRRERLHRLLHILGFLPKHYEEKIGWDLDNDSKHYGTFLENEEPKIAWMRNEEKKYEFIFQSSFHDMLEDFKKYHPDILSDDKKIPYDWTLYYLRQKALSQPIGKEELAWIILNFNQKRGYNQQRDEILDVSDDKKEEFMSLTVSSVTPDEDAKGKDIWYNIRFENSNIVYRRKSKYPLNWVGKKRNIIVTTKLDEDGNPKIKKDGSIDYSVKSPNDDDWALLKIKTEQELKASRQTVGQFIYSALLANPSEKIRGGIVRTIERDFYKDELEKILKKQSEFRAELQDRCLYEQCINELYRNNEAHRNNIAKNDFTFLILEDVLFYQRPLKSKKSLIDNCPYESHQGIDKETGEICTYPLKCIAKSNPYFQEYRVWKFLSDLRIIANTKEINGHIHTDVDITSELLPDNDSWSNLFIWLNNKGHITQSDLLTYLGIKKKEQSKYRWNFVADKHYPMNATRQAILNRIKDDEALSREQEQAIWHLLYSTTSKAEIDKSLSPSDNPSNIYAKLIKAGFSQESIEKIKTIKLPDEGYGAYSEKAIKKLLPLMRCGKLWNEKGIHPSTLQRIEAFSEKGGMDTFSENVKQRLFSMNIIDSFQRLPEWLACYVVYGKHSEANDIVKWKSPDDINIYLNNFKQHSLRNPIVESVILETLRVVRDLWKRYGDIDEIHIEMGRELKNPSDKRAQITQRVLQNENTNIRIKTLLAEFLAEEYKIDNVKPHSPSQQDLLRIYEEDVLAHNEPDDEIKDIINGLSNPTKQPTRTQVLRYKCWLDQKYCSPYTGQPIPLSRLFTSDYEIEHIIPQSRYFDDSFSNKVICESEVNKLKDNQLGYEFIKQHHGQTVQLASGKMVRVLEVEHYEQLVKDNFAQSKRRKLLMDDIPAEFIQRQLNDSRYISKVVKTLLSNIVRTTDEDGNLEREAISKNVITCNGSVTTKLKRDWGLGEVWNYIILPRFQRLNELTGRNCFTTFNTHGNEIPAMPLELQKGFSFKRIDHRHHALDAIVIACTTREHVNLLNNEAALPEHQEMKHALSHKLRRCEEIVINGKKRKIFKEFIMPWASFKNDTLLSLQQIVVSFKQNLRVLNQATNLYTKYENGQKTLSAQHSSDHFAIRKSLHKDTVFGHVNLQRKSTIKLKDALKYVNRIVDKRLKQKIKELRAKHYNDKQLLVYFKDYACEWKGYDFNKVNVFYFTDEKEPMVATRFCNDLVSIFSGKTKKQDVEKVIAQITDTGIQKILTNYLNENFDNIEYAFSAEGLEQMKENIIHYNDGKQHKPIYKVRLTETLGQKFQIGLSGNKTAKYVEAAKGTNLYFAVYQSEEGSRAYTSIPLNIVIERLKQHLSPVPERNDKGHNLLFYLSPGDLVYVPTLDELTTPCSNEIKPDRIYKLVSCTSYVADFIPAYIASPIITTTELGSNNKSQRAWTGEMIKDICKLLSISRIGEIKIK

SEQ ID NO: 23983 - protein, 1552 aa, unidentified
  REGION 1..1552: note = Cas Enzyme sequence
MKKILGLDLGTNSIGWAVVNAEKEIRNDETTYLKPMGISAAGSRIIPMDEGVLGDFDKGNTKSQTKERTDFRSARRLLERYLLRRERLLRVLNQMGFLPKHYANQIDEFGKFINYGEPKLAWERGADGKYDFLFKDSFKEMLADFAEKQPQLVADCRKVPYDWTVYYLRKKALTQRITKEELSWILLQFNQKRGYYQLRGEEEEEKTNETIEIISARILSVERKEKDKKYEKYWYEMLLDNGLIYRAAFYNDVSAWCGETKEFVLKTIVLKDGSKKNELSFLPTPDEIEAMDAKRKGKMYAKIKLRTENEIDNCHKTVGCYIYDSLLKNPNQKIIGKLVRTVERKYYKEELRQILEVQKELIPELKDEALYKACVESLYPNNEAHRNNIARPDFTTLFINDILFYQRPLKSKKSLISDCPYETRYDKEGNEHSVKCVAKSNPLFQEFRMWQFVRNLRIYQREKMVNGEQLDLFGNVSPSKLQTDVDVTNEFLKSENDYVNLFDWLNERISIKQDTLFGSYFKFKKEKGKDPYPYRWNYVEDKEYPCNETRAVILGGLSKCDINPDFLTHDQEMLLWHILYSIDDKNEIIKALKKYAEKNNLPGSFVEVFAKTKPYKKDYGSYSEKAIKKLLPLMRMGQYWSVDGIDTKTKERIERIITGEYDENIKNRVREKAINLTEIDHFRGLPIWLACYIVYGRHSEGKEIEKWENPEDIDDYLTHFKQHSLRNPIVEQVVMETLRTVRDIWKQEGQIDEIHLELGREMKNPADKRKRMTENIMQNENTNLRIKAMLAEFMNPEMGIENVRPYSPSQQDILRIYEENALDNLTKDDKDFDFISKMSKTAQPSKSDIIRYKCWLEQKYRSPYTGEVIPLAKLFTSAYEIEHIIPQSRYFDDSFNNKVICEAEVNKLKDRLLGYEFIKTNPGRIVQISQSKSVKVLTVEAYEKFVKEHYANNRTKMKKLLMEDIPDDFIERQLNDSRYISKLVKGLLSNIVREKLENGECEQEAVSKNLISCNGSITDRLKKDWGMNDVWNSIILPRFQRLNELTGKDCFTTYNAEGHEIPNMPLELQKGFNKKRIDHRHHAMDAIVIACATRDHVNLLNNESAHSKYNANRYQLQRKLRRFEKTVIDGKEKEIAKEFLKPWDSFTTDAKQILESIIVSFKQNLRVINKTTNRFQHFDADGKVVMRKQVVGDSWAIRKSMHKDTVFGEVNLRMKKTVSLVEALKKPERIVNKDFKFKVMELLKEGRDAKYIKKYVEENKDVWSDINLSKIEVYYFTKETNERYFATRFLSELVNYFAGVTKAEDAIKKIEAITDTGIQRILKAHLKVKNNNSELAFSPDGIDEMNRNIVALNNGKFHHPIYKVRRFEKGNKYAIGQTGNKSSKFVEADKGTNLFFAVFGVEKTNKETGETKQVRSYLTIPLNVMIDCQKRFGSKWRVSIEVYLKELELVTKDAKLLFILSPNDLVYLPMKDELKKGISMLDYKRIYKMVSSSGNQCFFVDEKVAKSIVDKVEFTSLNKAERAITGEMIKETCLPIKVDRLGNIIELYGKKL

SEQ ID NO: 23984 - protein, 1435 aa, unidentified
  REGION 1..1435: note = Cas Enzyme sequence
MKKILGLDLGTTSIGWALVNEKENENEKSSIIRLGVRVNPLTIDETLNFEKGKSITTNADRTLKRSMRRNLQRYKLRREHLIYVLKQHGFIDDNTVLSEQGNGTTFETYRLRAKAAAEKIGLTEFARVLLQINKKRGYKSSRKAKSTEEGQLIDGMEIAQRLYDNNLTPGQLSLQLLEEGRKYLPDFYRSDLTKEFDKIWDVQRQYYPDILTSELREELREKNKSQTWAICAKPFNIVGFKRETKGIEQRLENYRWRALALSQKLGLEELAIVLQDVNGQISNASGYLGDISDRSKILYFNKQTVGQYLMAELQKKTNYSLKNKVFYRQDYLNEFETIWEMQAKFHSELTAKLKKEIRDIIIFYQRPLKSQKGLVSFCEFESKKIITEVDGKQKTRTIGLKVCPKSSPLFQEFKIWQRLNDVIVSGNVILVEQSDLFDNPSSFTHGKRSLYQEEKERLFEELNYKDKLTKAEVLKLLFGNPKDYDINFQTLDGNTTQAELFKAYQTIIEMSGHGAYNFAKMDTKDILRIVREVFNKLNISTDILTFDSSKEGYALEQQYMYRLWHLLYSYEGDNSVMGNESLINKLQVIFGFKKEYATVLAGVVFKSDYASLSAKAIRKILPHMKDGNDYSVACEYAGYRHSKRSLTKEEIKNKILKDKLELLPRNSLRNPVVEKILNQMINVVNGISSTYGKPDEIRIELARELKKSAKEREEMTKSINAVTRLHEDYVKILQSEPFNLSYVSRNDIIRYKLYLELEKNGYKTFYSNTYISKEKLFTKEFEIEHIIPKAKLFDDSLSNKTLEARQVNLDKRDMTAFDFIESNYGKNYASQYANKIEDLYLNKAISKTKRDKLLMRETEIPSGFINRDLRDSQYIAKKAREILEEYVPVVVPTTGSVTDRLREDWQLVDVMQELNWDKYDKLGMTKYEIGHDGQRIPKIKDWTKRNDHRHHAMDALTIAFTKHSYIQYLNNLNARVQKGVDDYIDLDMVNLSELDKDQRSSVMYAIEKKELKRDKHGKLRFIAPMPVDEFREEAKHQLEQILISNKAKNKVVTRNINVSKKKSGSNKAILLTPRGQLHLETIYGSSKTPVIKEEKVNASFDNLKISTICSMKYREALSNRLQQFSDDPKKAFTGKNSLEKNPVWIDENHTEKVPEKVKTLTCETIYTIRKEITPDLKIDKVIDNRIKSILQARLAEYGGDAKAAFSNLDKNPIWIDKEKGVSIKRVTITGINNAVALHDKCDKDGRLILDKDGKKQPVDFVSTGNNHHVAIYRKPKVDKKGQQLYGNAGEPLYELDEKVVSFYEATSRAVLGYPIIDKEYMKDRGWQFLFTMKQNEYFVFPEYDNNGNLTFNPLDYDEDWYRNPKNYSIISPHLFRVQKIATKNYFFRHHLETTVEEPKELKGITYKPQLGLNGIVGILKVRVNHIGQIVSIGEY

SEQ ID NO: 23985 - protein, 1236 aa, unidentified
  REGION 1..1236: note = Cas Enzyme sequence
FRAPKEDDWTLLKKKTEYDIDASHKTVGCYIYDTLLQNPNQKIIGKLVRTVERKYYKKELGKILETQKVLISELQDEDLYKKCIEELYPNNEAHRNNIGKPDFAKLFIDDILFYQRPLKSKKSLISDCPYETRFDKNGIAHPVKCIAKSNPLFQEFRLWQFVQNLKIYQREKELDEKLQTDVDVTHEFLKSEDDYVELFDWLNNRSLIKQDTLLNSYFKIKKEKGKEQYPYRWNYVEDKEYPCNETRAAILSGLSKSGIEAAFLTHEQEMSLWHILYSVEDKTEIGKALGKYAEKHNLPESFSVVFSKMKPFKKDYGSYSEKAIKKLLPLMRMGNYWSVDAFDVKTKERIVKIITGEYDEGIKNRVREKAISLIDISHFRGLPVWLACYIVYDRHSEAKEIEKWEKPEDIDNYLRGFKQHSLHNPIVEQVVTETLRTVRDIWSQEGQIDEIHLELGREMKNPAEKRKKITARIQENENTNLRIKAMLMEFMDPEMGIENVRPYSPSQQDILRIYEENALENLTKDDKDYDFISKVSKLAKPSKAEITKYKCWLEQKYRSPYTGEMIPLAKLFTPAYEIEHIIPQSRYFDDSFSNKVICEAEVNKLKDRLLGFEFIRNHKGEKVQISQGKTVEILSVDAYEKFVKEHYSNNRTKMKKLLMDDIPDGFIERQLNDSRYISKLVKGLLSNIVREKLDNGEYEQEAVSKNLISCNGSITDHLKKDWGMNDVWNSIILSRFQRLNVLTGRNCFTTISAEGHEIPTMPLELQKGFNKKRIDHRHHAMDAIVIACATRDHVNLLNNEAAHSKHNANRYQLQRKLRRFEKRIIDGNEKEIAREFLKPWDSFTTDAKLILENIIVSFKQNLRVINKTTNSYQHYNEKGKKVLVKQHRGDSWAIRKSMHKDTVFGEVNLRFVKTVSLNEAVKSPKRIVNREFKKKVLDLLESGHDAKYIKKYIEDNKDVWTDIDIKRVEVYYFTKETNDRYFATRKSLDTSFNRKKIEESVTDTGIQKILLAHLETKGGDPELAFSPDGIDEMNRNVVVLNHGKFHKPILKVRVYEKADKFAVGQTGNKSAKFVEAAKGTNLFFAIFSSEKTNKDTGETENVRSYLTIPLNVMIDCQKKYGSKWRVEIESYLKEIGLVSVDARLLFVLSPNDLVYLPTKNDSNDFDKNRIYKMVSSSGPQCFFIGNRVAKSIVDKMEFSSLNKTERAITGEMIKETCVPVKVDRLGNIIELEGKKL

SEQ ID NO: 23986 - protein, 1111 aa, unidentified
  REGION 1..1111: note = Cas Enzyme sequence
MISDRSKELYFNQQTIGQYLMQRLDENPNNSLTNIIFYRQDYMDEFEAIWEKQAQYHPELTPELKKEIRDIIIFYQRDLKSCKNLVSYCELEHTEREITIEDKKKTILTGCKVCPKSSLLFQNFKIWQILNNLQVSVVGHQRKRLKKDKSQLSLFDDVEAGALNRFLTQEEKDILFNELSIKEKMSKREILKLLFDNPKNLDLNYKEVEGNETMATLFKAYQNIISLTGNGEYDFSKMPADEVMSVTTEIFTGLGYKTDYLTFNPLLEGKSLEQQSAYRLWHLLYSYTGDKSVTGNEALLNKIRALCGFEKEYAAILANVSLALDYGSLSAKAIRKILPYMMKGYEYSEACKMAGYNHSVRSLTKEEIANKEYKNHLDEIRRNSLRNPVVEKILNQMINVINEIVKTYGKPDEIRIEMARELKKSQEERELLDAAIRKNTAESEQLRKELEEEFGIQHVTRNDILRYKLYNELKLNGYKTLYSNTYIPREELFSKRFDIEHIIPQSRLFDDSFSNKTLEVRDINIEKGNKTAYDYVTEKFDEQGLTDYESRVDELFNNKVISRTKRNNLLMKEAEIPSDFLERDLRDSQYIAKKAREILEDLVPFVVTTTGAVTSRLREDWQLVNIMQELNWDKYNALGLTERYTDKNGNIVKRIKDWTKRNDHRHHAMDALTIAFTKRSIVQYLSNLNARSDKSSSIYGIEQKELHRDEKDHKLVFNAPMPLDEFRAEAKKHLESILVSIKAKNKVVTKNINKAKTKDGYQHKIQLTPRGALHNETVYGKIRNYEAEYRKIDGKFTEETILRVSNQKYRDALLKRLDEFDNDPKKAFTGKNSLEKNPIWLNANHSYAVPLKIKLYKIVNVFTIKKAVDKDIKLDKVIDNKVRAILQQRLDEFGGDAAKAFSNLDDNPIWLNQEKGIAIKRVKIRAKVSSETSVPLHVKRDLPGNIIKDTLGNAIPTDYVNTASNHHVAIFIDSDGVWHEHVVSFFEATASALMGLPIVDKNYKSEEGWKFLFSMKQNEYFVFPNEKIGFVPSEIDLTDPNNYHLISPNLYRVQKFSSSFYVFRHHLETNVDESNKLMGTTWKRITSIKNLDQVVKVRLNNLGHILSVGEY

SEQ ID NO: 23987 - protein, 1379 aa, unidentified
  REGION 1..1379: note = Cas Enzyme sequence
MSKKILGLDLGTTSIGWALVKEDENLENSSIIKLGTRIIQFDNFSKVDKTGKVSESKDPEGDFNSGRGLSPNADRTSKRGARRNLNRYQLRRDNLLEILRKNNIIDTDFEYAENASNSTYYSYKVRANAASSEISLNDFAKVLLMINKKRGYKSSRKAKSEDEGMAIDGMAIAKEMYENDLTPGQYVLQILKAKKKYIPDFYRSDLQNEFDKIWSFQKQFHPEILTDEFKKQLEGQGLQNTKKIFLGKFKIFTAENKATDKKLQSYEWRCKALLEKLNEDELAYVISEINNNLNKSSGYLGAISDRSKELYFNKITVGQYQYTQLSKNPHASLKNQIFYRQDYMDEFERIWNTQSQFHKVLTDDLKKEIRDIVIFYQRKLKSQKHLISTCEFEKHHKVIARSNPLFQEFKIWQVLNNMEFTNTKTKENSILDEETKKLIFNELNIKGRMNKKEVIEFLGYKDKEYELNFKEIEGNNTNKALYEAFRVMFERDGHYLDLSKNAETIKQETKLLLNEAGINTQIIDFDAEIEGNEFDKQLSYQLWHILHSLEEDKEIIKTLQSKFGFTEEFAKIIANVSLQQDYGSISARAIKKILPYLKAGNKYSEACALAGYNHSSSFTKEENDTRILKDKIDILPKNSLRNPVVEKILNQMIHVVNAVINDPELGKPDEVRIELARELKKSAKERVEMSSNIAAAKLDHEKFRKLLSESPFFIKNPTRNDVIRYKLYEELSANGYKTLYSNTYIPKEQLFSKNFDIEHIIPKAKLFDDSFSNKTLEQRDVNIKKADSTAFDFVSKEFNSELDKYKSNVEKLYKEGKISKAKYQKLLMTSDKIPDGFIERDLRDTQYIAKKAKQLLHEVFRTVTSTTGSVTDRLREDWGLVNIMQELNFEKYKALGLTEHVEKKDGSTKERITDWTKRNDHRHHAMDALTVAFTKPAYIQYLNNLNAKKEDTPKGKEIYGIESKYLEKVKTDDGFNRVFKSPIKNFRTQAKEHLENILISFKAKNKVVTKNRNKIKLKGKDNYKEQVTLTPRGQLHKETVYGKIKTIKVSEEKIDGKMTVDKANTVCNPLFKELLLQRLAQFDNEPNKAFTGKNSLDKNPIFLDQAKTVRMPEKVKTQSFEDDYTIRKDVNPDLKLDKIIDEGIKTILEARLKEYNNDPKKAFVDLEKNPIWLNEAKGIAIKKVTISGVKNAEALHSKKDHLGKLILDKNGNPQAVDFVSTGNNHHVAIYKDEQGNLQDAVVSLYEAVARVNAGLPIIDKNPRNEKGEPLNWTFLFTMKQNEYFVFPDSTFNPKEIDLLDTKYAKEISKRLFRLQKFSKVTYGNSSVRDYVFRHHLETKVDDRKELANIAFKSIKSLGYFDNMVKVRINHLGKIVHVGE

SEQ ID NO: 23988 - protein, 1440 aa, unidentified
  REGION 1..1440: note = Cas Enzyme sequence
MNKIFGLDLGTNSIGWALRNPDLVGNQIEKYGVLTFNKGVGLGKTGEYSYAAERTKKRSARRLYQSRKYRLWATLEHLITEGYCPLNIEDLNKWRHFDKNEARKNNNGGRIYPTWNLAFDAWIKLDFNMDGLPDYSSPYQLRKELAGLKLDFTKEENRFKLGRALYHIAQRRGFKSSRKGADDIKEKDTDENEVMDLQYSEKKKNKLIAELFESHVEAKTIGWLFALLEDEKVRIRENISQHAIRENYKDEIKYIFQFQGFNFENLLYIKLVETGRNKNDGSIFYKRPLRSQKGLIGKCTLEPNKYRAPISHPSFEKFRAWAFLNNIKYKENNEWNQLPLELKQDIYNELFFRKSKAYFPFSDIVTFLGKKDKSKNWQLNYSPKTTVTACPVSARLKDIFGNDFLHIKIKKEQKSKSGKDYYDIEDVWHILFSYEDQEYVSEFAESKLKLDSEKLKQFVIAWNACPVGYGMLSINAINKINVFLEKGLIYTEAVLLANIPNVLGKELWQKNELLLLDNIGSVIDQNRQQKSILNIVNTLISRHKNLEASEKFGFKDKNYKLDDSDFNDIRNVVLEYFGSNKWAILLDSEKDRIFNSIKDCYQAYFANQGIVRNQGSLERLVTIQSNGENYYRTETGYYQLPKLIDTLKDFLKNNFEHLDDESFSKIYHPSEINIYPTAKADKDGIVKLGSPKTGSFKNPMAMRTLHELRKLLNYMIETNQIDNETRIVVEVARELNDANRRWAIEAWQRQRESENQEFAEAIKRLLQEDNTIKASAVSNNDIDKLRLFYEQYEDQLLPPVIEFEDDENVAKKKKKANAKDDVIRWNGYGKKLIEKYKLWKEQGYQCLYTGKLIRLTDLFDDNVIDFEHTLPRSKSFDNSLANITVCYHDYNRTVKKNKIPTELQNYDKDYDFGGAIGKCTAIKPRLEAWEERVKRIRQQVDFWKTKAKKASNKSWKDDAIRQRHLWQMELDYWQNKLNRFTITEITSGFKNSQKVDTQLISKYAFHYLKTYFDKVDVQKGSITSAFRKIYQLQVADEKKDRSKHSHHAKDAAVLTIIPVAVKRDAILEKYYESKENRTKFTETEPYKGFKREYILNIDDNILINNITNNQELTPSKRKIRKRGKEVFIEKTDGTKVNKLATGDSIRGQLHQDTFYGAIKPSKRGENGNLLKDENGKFIQEDQVKYVLRVPFTADFNSIEKIVDEGLKKQIKEHAKRAGGFKKAYEEGIYLLDKEGNPHGNKIRHIRIFKDGEVKEPLAIKKQTNLSNKDYKQSYWAANATNCYFAIYKKDDKKYFDMRNLFETANFSSLNPIKKPKELFEEKITIIKGKNTIELPLTYVLESGLKVIFKKSAKEDLRMLEINELNKRLYVFTNYEKDGRLNFKHHLEARNKIEEIYSESEIDFQNSKPTLRFGYSKYDFFVEGHDFKVNMDGTIDWINPE

SEQ ID NO: 23989 - protein, 1461 aa, unidentified
  REGION 1..1461: note = Cas Enzyme sequence
MKKRTILGLDLGTNSIGWALIEKKEIENTGKILGMGSRIIPMGQDVKDEFGKGNPISKTADRTRYRLIRRIKSRKLLRRERLHRILNILDFLPNHYKEHIDFTNRLGKFKENTEPKVAWKRNNEGKYEFFFKQSFLEMSNDFNGKEIPYDWTIYYLRKKALSKPISKEELSWVILNFNHKRGYYQTRGENSENNSNVKEFVISQKVIGIKKGEPDNKNKNRNWYNIELENGWVYNATFTTAPDWLNLEKEFLVVEELDNQGKIKLVKEKKTDSTGKEKRKITLLPTFEEIELLSKSEQDKLFKKIKTRTEATISNSGTTVGTYIYDTIIKRPFQKINGKLVRTIERKFYKEELIQILKTQIEFHPNLFSHSKFVECVKELYPNNDSHRERLLQKDFIHLIVEDILYYQRPIKSKKSTISNCSLEYREYTSENKNKNGENVLIKSYRKVVPKSNPLYQEFRVWQFINNLRIYKNIDNQDVTNEFLNNINVFELLFEFLDCRKKIDQKTLLEFLLKIKLNLKKVTSNEINKYRWNYVEDKEYPCNETKSIILERLRKVDGFNESLFNSDFLYQLWHITYSVNDKVDFEKALLTFARKNNLEEDSFRKCFKDIPNLTKEYGSYSEKALKKMLPLMRLGKFWNWDSINTKVQKRICKIIDGEYDEGITEGLRKKLAEYSSINAYQGLPEWIVKDVIYGYTKDTNRWTSTLDIDNYLNEFKQHYLRNPVVEQVVVESLRIVKDIWLQFGNANNNYFDEIHVELGREMKHTSEERKRFSEKNLENENTNARIKSLLMELMNDSKISGVKPFSPTQQEILKIYEEYAIANEEKYIGKNEDGEDIFQYEKTPDEILKISKLAQPTSIELTKYKLWLEQRYRSPYTGQMIPLSKLFTSEYEIEHVIPQSRYFDDSLSNKVICESAVNKIKDKKLGLEFIKEHQGQIIETGDGRRSVKILKEIDYIKFVNETYDKLRSKKNKLLLDEIPDEMIERQMNDTRYISKFVSILLSKLVRLDNDDGVYSKNIILGNGKITSLLKQDWGLNDVWNEAILPRFERMNQIDKNSKYTTQNKEGHFIPSIPFEYSKNFQKKRIDHRHHALDALVIACVTKEHVNLLNNLSAKSENVRYDLQNKLRNTEKWIDKNGHNRLKFTSFKKPWESFTIDAKEKLFEIVISYKQNLRVINKTKFKDLTYAESKKKSNDMNWSIRKPLHKETVSGEVKLPWIKVPKGKVLTASRKSINTDFDEKVIHSITDRGIQKILLNYLKAKGSPDIAFTQEGIEELNRNIEIYNDGFPHKPIHKVRIFESGSKFPLGYKGNNKSKFVEAAKGTNLFFAIYEDKNGKRSYNTISLNVVIERLKQGINPVPDFNDNSDRLLFYLSPNDLIYVDDGIDNFDLRKLNNAQKKNIYKVVSFTGGRLYAIPHYVAKSIVDKMEFTKLNKVEFTSDNISIKANCYKIIVDRLGNIKDLK

SEQ ID NO: 23990 - protein, 1122 aa, unidentified
  REGION 1..1122: note = Cas Enzyme sequence
MKKIVGLDIGVSSIGWSFITESEKETNEEGEDIVKLGCRIIPLSKDDSDQFLTGQSITKHKDRTQGRTARKTNNRYKLRKHKLKNIIVEKGIIIDNELFNLSAKELYALRVRAVYESISLPELARLWYLFNQKRGYQSLRGVIDEEADKKSNYLTTINDRSLFLKENNLTVGEYLFQRIEDYEQNRGLIEPITNVIFNRQDYINEFNRIWIRQKEAFPEVLTDEFLTNIRDRIIFYQRPLLSQKHLVSDCAFEKNHKAAPKSSPLFQIFKIWQDLNHFEIKTKRGAIVDFTLEMKKKVFEVLDEQFHIDKKTFWNIIGLKATEHRLNFKEIRGNITKAKLVDAFSQLNINRPDLLSFDPYGNPDEQPLFRLWHLLYSITDKKADDILLKTLQNAPYRFAESEAKGLIQRCSFVNDFGSLSSRAMRKILPFLEQGLPYDKACLEVGIRHSNYRTKEENEGRILADKLLPLPKNSLRQPVVEKIVNQVVNVMNAILADPNLGRPDEIRIELARELKQNIKQRKRTEENNNKRQKARKDVVKEILKTFPNMKEKEVTVRMIQKYELFQETNGICLYTGEKMELGAVLLGQGYDIEHIIPKSRRFDDSFLNKTLADSSTNCAKNDLTAYDFVRNKGMVAFEKYTEIIHKLHKDKKISEAKLDNLLTTLNPVWIAEQEAKALSTDFISRQLKETQYITKQVKAELDKICKKITVTSGGITDYLRHQWGVDEVLKNINLEKYESAGKVSDENYRDRQGNWRTRKKIEDWSKRDDHRHHAIDALVIACTKPAYIKRLNDLNQEYDNQQEMKKDSGKKESLTKFPQPKLKGGFIQNVTDATENILISFKSGKKAVSTSKNKKTGQITVIPRGQLHEETVYGQRIDKETGERYFVIRKALKFDRMGYFKDLKQIDKIEDKIVRDKILKRIDEFGGDIQKALSTVIYHNEEQKIPIKKVMIKAQIKKAVSLGNHDGKFVAEGNNHHLALYRNEKGKYLTEIVSLWMAVVRKQNGIDIICRNHPEGHLFVTCYQQNEMFIYELTPEQIQNAIDIKDNRMLSKYLYRVQKITKKDSGAFAVGFRHHLETKLDDSDTANLLKKFIFVQGLSDLLKFTKVKINHLGQITKVFVEGE

SEQ ID NO: 23991 - protein, 1461 aa, unidentified
  REGION 1..1461: note = Cas Enzyme sequence
MKILGLDLGTNSIGWALIEQDFEERKGKIHGLGSRIIPMSQDILGEFDKGNSVSQTAERTGYRSVRRLRERHLLRRERLHRVLNILGFLPEHYASQIDFAKRLGKFINETEPKLAYRPIWNEAKQKNEYDFIFKKSFEEMLDDFRQHQPEILVNEKGESKLIPYDWTIYYLRKKALTQKIEKEELAWVILNFNQKRGYYQLRGEEQEENPNKLVEFHSLKIVEVTADEKPNNKGETWYSLKLENGWVYRRPSKTPLFDWQNKVRDFIVTTDLNDDGSVKTDKEGNEKRSFRAPGEDDWTLLKQKTEQEIDKSHKTVGAYIYDTLLKNPKQKIKGKLVRTIERKFYKDELKQILLKQKDEHPELQNNDLYNDCLQELYRNNEAHQLLLSSKEFVHLFLDDIIFYQRPLRSQKSSIGNCTLEYRKYKDENGIEHLEYLKAIPKSNPYYQEFRIWQWMYNLSIYKKEDDSNVTTDFLNSKEDWERLFDFLNNRKEVEQKSLIKFLLEQKGLKGKLLNAEIEKYRWNYVEDKKYPCNETKTLISTRLEKVENNRDNFLTREIEQKLWHIIYSVTDKIDYEKALNSFAEKNHLEVASFVEAFKKFPPFKSEYGSFSEKAIKKLLPLMRLGKYWSWDAIDERIRIRIEKIITGEYDENIKDRVREKALHLTQEDHFRGLPLWLAQYVVYGRHSEAATLGKWNSADDLEQYLKDFKQHSLRNPIVEQVVTETLRVVKDIWIKYGNGAKDFFDEIHIELGREMKNPAEERERITKQISENENTNLRIKSLLVELKNDITVENVRPHSPMQQEILKVYEEGVLNSDIEIEDDILKISKTAQPSIVELRKYKLWLEQKYRSPYTGEIIPLNKLFTPEYEIEHVIPQSRYFDDSFSNKVICEAAVNKLKDNQLGYEFIKNHHGEKVQIGNKTVQIFEVNGYEDFVKQHYAKNRSKRNKLLMEEIPDKMIERQMNDTRYISKFISSVLSNIVRAEISDDGVNSKNVIPGNGKITSELKQDWGLNDVWNELILPRFERMNKLANSSHFTAWNDNHQKFLPTVPLELSKGFSKKRIDHRHHAMDALAIACATRDHINLLNNKHAKSKERFDLNRKLRKFEKVAYNHPQTGERIEKEVPKDFIKPWESFTVDARKALENIVVSFKQNLRVINKATNHYENWVDKDGIKIKDLQEQKGTNWAIRKPIHKDTVSGKVELQRIKVPKGKILTATRKSIDTSFDSKTIESITDTGIQKILVNYLSSKGGNPELAFSPEGIEEMNKNIEKYNDGKPHQPIYKARIFELGSKFPLGQTGSKKTKYVEAAKGTNLFFAIYQDSEGKRNYETIPLNIVIERQKQGLSSVPLENEKGDKLLFHLSPNDLVYVPTEEETENINLITWQNVSKEQIEKIYKVVSFTGKQIFFIRHEIATSIVNKAEFSALNKMERATDGRMIKETCVKLKIDRLGNIRPAKQFYPTL

SEQ ID NO: 23992 - protein, 1560 aa, unidentified
  REGION 1..1560: note = Cas Enzyme sequence
MIKKILGLDLGTNSIGWALIQQNFEGNEGTILGMGSRIIPMSQDILGDFGKGNSVSQTAERTTYRSIRRLRERHLLRRERLHRVLKVLGFLPEHYATEIDFESRLGKFISETEPKIVYKKVWNEKKDKNEYKFIFQKSFSEMLADFKMNQPQLLKNEKGEDKLVPYDWTIYYLRKKALTKKIEKDELAWLLLNFNQKRGYYQLRGEEEELNPNKLVEFYSLKIADVQADEPQKGKADIWYSVILENGWIYRRSSKTALFDWKDKVRDFIVTTDLNDDGSVKRDKDGKEKRSFRAPAEEDWTLLKKKTEQEIDNSHKTVGEYIYDTLLANPKQKIKGKLVRTIERKFYKDELKKILEAQKHFQPELQSEDMYNECVRELYRNNESHQIILSKKDFTHLFLEDIIFYQRPLKSKKSSISNCTLEYRKYLVNGMEKTEYLKAIPKSNPIYQEFRLWQWIYNLNLYKKEDDTNVTNEFLNHVEDYENVFEFLNTKKEIKQEILIKYFLEKKGLKGKVLTNAVVKYRWNFVEDKVYPCNETKALITARLSRVDNVSNDFLTNQIEQQLWHIIYSITDKMDYEKALKTFAKKHKLNEESFVENFKKFPPFKSNYGSFSEKAIKKLLPLMRLGKYWDWNLINEKVKERIVKIVHGEYDEDIKDRIREKTIHLSEENNFQGLPLWLASYIVYGRHSEAASLSKWNTVEEIENYLEEFKQHSLRNPIVEQVVTETLRVIKDIWKYYGNGAKDFFNEIHVELGREMKNTAEERKNITNQVTENENTNIRIKALLTELLNDKNVENVIPYSPMQQEALKIYEDGVLGSDIEIPEDIEKISKTAQPSINELQRYKLWLEQKYRSPYTGEIIPLNRLFTSDYEIEHVIPQSRFFDDSFNNKIICESVVNKLKDNQLGLEFIKKHHSQIVETGKGKTVKIFDEEEYKEFVKQHYEKSRSKRNKLLLEDIPEKMIERQINDTRFISKYISSILSNIVREDKDDDGINSKNVIPANGKITSELKQDWGLNDVWNDLILPRFERMNRISNSATFTTYNQKYQKHLPTVPLELSKGFQKKRIDHRHHAMDALIIACATREHVNLLNNQYAKSPKRYDLQRKLRKFEKVSYNDRKRNEVIEREIPKEFIKPWKNFTVDAKNAMEKIVVSFKQNLRVINKTSNKYEKWIDENTEKQKEFVQQCKGDSWAIRKPMHKETVSGLIKLRKNKEVSLNTALDDHLNIVDKKLRQEIETLIKTGYDKKKLVKHFKGLKNEHRDVSKVEVFYWETDNVASRVSLDTSFNKNRIESITDTGIQKILLNHLKKYNGRKDEKEKEIAPELIAFTPEGIEEMNKNIVSLNNGKFHQPILKVRTYEPKGNKFNVGQTGNKKDKYVEAAKGTNLFFAIYENENGKRNYETIPLNEVIEHQKWRATLSKDEQKNIPMIPAKAEKGLLLFYLSPNDLIYIPDQEENPLTTVDLSKRENIYKVVSFTGNRLYAIPHNIAKSIVDKVEFTQLNKLEFSLLKIPIKDTCIKLSINKIGQVMLAKSTNEFEKKEDADLDTLPIIDIYNHNDNSAKAVN

SEQ ID NO: 23993 - protein, 1531 aa, unidentified
  REGION 1..1531: note = Cas Enzyme sequence
LGTNSIGWALTNNDFDNKFGNIEGIGCRIIPMSQDVLGKFDSGVSISQTAERTKYRGTRRLVQRFLLRRERLHRVLNILDFLPKHYASAVDFDKKFGQFKPEKEEKFSFFKDESGKNQFLFLESHQEMLAEFKLTNPDLKQVPYDWTIYYLRKKALTQKISREELAWIILNFNQKRGYYQLRGEEKEENKNKLEEFHTLTVVNVIEREKGKSGIWYNVILENGWVYKRESKIGLFEWVGKQKNFIVTTELNDDGTVKLNKDNEEKRSFRAPKEDDWGLVKIRSEQTINQSGKSVGSYIYDNLLKNPNQKIKGELVRTIERHYYKSELKQILETQIEFHSATLKDRNLYKKCIDELYKHNDSHKNSIKERGFDYIFLDDIIFYQRPLKSKTSLISDCSLEFRPIKDKSGNLVKDVNGYQILKPLKCIAKSNPIFQEFRLLQFVKNLKIYKKDIANDVDVTNDYLKTEEDVVELYNWLNDKAEISQKQFLAYQKFKLKEDKFRWNFVEDKIYPCNETRNQFLNAIAKIDMDKSFFDAKNTQDLWHILYSVTDKIEISKAITTFAKRYSLPDGFIINFSKLKPYKKDYGANSEKAIKKLLPLMRFGNHWNEKNIDTKTLARIDKIETGEFDENIKTRVREKALHLNVLSDFKGLPLWLASYIVYDRHSETSDISKWKTPADIEHFLKHDFKQHSLRNPIVEQVITETLRVVKDIWQYYGEGKENFFNEIHIELGREMKNNAADRKKITDNISHNENTNLRIKAILTELKNDGISDIRPYSPSQQEILKIYEEGIYSSENSKEKIEEVDKIRKNAKPTTSEIIKYKLWLEQGYISPYTGKLIPLSDLFTTKYQIEHIIPQSRLFDDSLSNKVICESEVNDLKGNKTALEFILKNEDRIVTLTGGKTVKIFARDAYNQHITSYYSKNKSKQKRLLSEDIPEKFIERQLNDTKYISKIVKNLLSKIVREDNEQEVTSKHIISLNGSITSKMKQDWGLNDVWNNIVIPRFKRLNTITNSSDFGKLEFKKDEFGNTGKQVFQTTVPDAIAKGFSKKRIDHRHHALDALVIACVSRAHINYLNNLNARDENDKTIKHELRNKLCLKTKPDANGNYNWEFHKPWENFTKHTEDELNQTIISFKKNTRVINKTVNKYVSYQDENGNLNLGKNGLVEKKIIPQKKGDNWAIRKPMHAETVSGKVFLKRIKQSHITIANAIEQIKLIVDKEVKKQLAAKIKQYPNNDAGLKKHLKAFPVMIDGKAIDKIQIYEAIEATATRKTLDFTFDEKRIEKITDTGIQKILLNHLKQEIYQNTIDENGKKIPAHEVAFSENGLDDLNKNITALNDGKKHQPIIKVRVFEEGGKFSLGQTGNKADKYVEAAKGTNLFFAIYQDEKGKRNYKTIPFNEVIERQKQGLSSALEKHENGNRLLFTLSPNDLVYVPTEDEKENLTLLDFNKLSKEQAERIYKFVSCTSGEGHFVSHNYSKEIISNENGSNNKNERMLEFNPSNTIYDEKEKPVMIKSVCWKLEIDRLGKIKKIIR

SEQ ID NO: 23994 - protein, 1379 aa, unidentified
  REGION 1..1379: note = Cas Enzyme sequence
MEKILGLDLGTNSIGWAIREVNSELENQIIDKGVLTFDKGVAEDKSGEHPMVQKRTESRGKRRNYQAEKYRKWNLLQSLIENKMCPLSIDELNDWRHYKKGVGRKYPQNEKFINWLRFDFDGDGKPDFVRLGFNKHESYYLFRDLIVDEKKTEIFKKEPHIIGRVLYQLVQRRGYNDGQNIDETEKDELSKTIMKGGGEAGAVGVNDILPYIEKHKTLGAALYHLQKEQNVRIRKRYNLRSHYEREIKEICRVQNLEHLFKAFWGAVIWQRPLRSQKGLVGVCTFEQNKRRCPISHPLYEEYRTWVFINNLRIKAIADDGTKTDAEQHALLLSVLKNTVYPQFLKASDFKLSSIAKELRKKGYEITAKFTDDTKVVNLSFLFKMKEIFGEGWEEKTGWTKVLNGILDKPKYNIEDLWHLHFVKSDNKDTGETGFDFLKRFGIEKLKLEETKSETFAKIRLQQGYATLSLSAIKKILPYLRQGFIYSEAIYLANLHKVLGMAELSENIITHFSEEVKNIVKQASFEKKLVQSVNELINDQLNSKNRFGMDASYQLDEDDQKDIEQKLSECFGKLSWDNLEDEKKQIARTTVGNKYLAFLQKKIHAKNVFEKTERLHNKIFKWLKDTYHVPDTNIKYLWHPSEQETYRPAVEKNGKHYLGSPEPISKGFKNPMALKTLNKLKKLINYLIAVEKIDEDTRVVIEIARELNDANKRKAIERWQRDKEKENETIKKTIDEINKECKTDFNREDKNIIDKIRLWEEQMRTCIYTGKTINLCDVLNGVKYDYEHSIPSSMSFDNELKNLTIADSYYNREIKKKKIPYECPNYDKEFVHNGITYPPILSTLQTMFGRIVETEKKVKGGVIKKKNFQKIIELEELLAEWKGKTSDDKQTKDNIIIRRHLIKMELDYWRYKLHTFTTSEYKAGWRNSQLRDTQTITKYALPFLKTVFNKVDVQKGNITADFRKIYKIQDRLEKKERTKHSHHAIDAAVLTLIPPAAIRDKILFHYNEANENNQGYHEKPRQWSNFHQQYITGIENDVLINYQPDHRTLTPTYKTVRKRGKIQFVREKMPDGKWQYKLDDAGKKIPLTAQGNSIRGQLHKESYFGAIMNKGELNLVERYPIAAFTSINDCKNIVDDAVRMIVKETLEKRMSDGLSFDKAKLDPIPFPNGKAIIKKVRCKVAAGRGYLTPEKAIEIQKHSFPSKHKYKQHIYAQNDQNTYCLYYEREFENKTERAFRIIGLFDLAKLGIKNEKELFQDSYYDKIEVGRGNKKKEIPLVQVLKVGTKVIFYEEHIEELKELAQPQLLNRLFRIYKFNEKGTLFVYLQNHLEAGRNDSLGDGEKRIDFNCYQPRVYLSPSNFICAIENKDFEIKLDGEIFWKI

SEQ ID NO: 23995 - protein, 1217 aa, unidentified
  REGION 1..1217: note = Cas Enzyme sequence
MKRILGLDLGVGSIGWSLIQADDEGNPQSILDIGCRIVPLSPDDTNEFSSGNAISKNRKRTQKRTCRKGYDRYQQRRQNLTDELRGLGMLPDERLIKLPVLDLWQLRADAATPGKKLTLPEIGRILYHINQKRGYLHSKTDEDDKAQRDYVQAINNRFAHIKAEGKTIGQYLAGKLADSEVTTDKGQFYTFRIKEQVFPRKAYQEEFDQIIACQRIHYPDILTEEVIHRLSDEIIFYQRPLKSCKHLISQCEFAMREYKTADGKRIQAGPKVAPRSSPLFQVCKIWESVNNIEMKNRNGESYPFSEEERLKLFNFLDNNEKLTVTDLKRILGLSVKDKWWGGKAIGKGLQGNTTKIALKKALQGHEGLLSFHLKTVDSRHIDTETGVILQEIAPGFEKEPLYRLWHIIYSIKEPDEMASALKQQFGIEDPEVLSRLAKIDFVKAGYGNKSARFIRQILPYLQKGLKYSEACDYISINHSNSLTTAENKSRKLQPRMQQLQKNELRQPIIEKILNQMVNVVNALLDKHVSIDEVRVELARELKQSRDERNSTFLNNSKRERENKIISERIQEMGIRPSRNRIQKYRLWEESKHICFYCGQPVGVREFMEGVDVEIEHIIPRSLFFDDSFSNKVCACRKCNAEKGNRTAYDYVKKKGENEFADYTRRIEEAFEKKEISKTKRERLLTSAKDIPEDFIDRQLRQSQYISKKAVEMLKQVCRNVWTTSGSVTDFVRHQWGYDNILHDLNFKRYKDAGQTEIIVCDQMGQVRQVERIKDWTKRLDHRHHAIDALTIASTKQSYIQRLNHLNASRDQMFQELETQSNKVREEYSLLENWMKERPHIPVSVVSQIVDGILVSFKTGKRLTTPGKRYTYKGGKREIAQSGIIVPRGALSEDSVYGVISCLEENVPVKKLFEHPDIIFKPYIRTKVENRIKEYDGDWKAALKSLKKAPIFLGDGETKPLEYATCWKKEYVIRYPLASIQKKDVKYIVDQHIRQLVSERLNAVGEKDAFKEPLFSDKAEKNPIKSVRLFTGLTHNSLSPVKYLDGFPIGYSKPGNNHHFCYYRNENGELFEHIVSFWHAVDRKKYGIPVIIEDTDVLWDEMANRDLPQDFLKYLPPVGLKLEVSLQQNEMFILGMKDEDYERSIKEKDLRMLNQYLYRVQKISSQYIVFRRNTDTGKDEDSKAQSIGQFVRVSSIKGWIQCNPHKIRVNVLGEISEI

SEQ ID NO: 23996 - protein, 1370 aa, unidentified
  REGION 1..1370: note = Cas Enzyme sequence
MASKTILGLDLGTTSIGWALVREGDNADILKTGVRVIPLTTDEIQNFDKGKSITTNADRTLKRSMRRNLQRYKQRRENLIEILIENRLITNTTILTEVGNASTFETYKLRAQAVNDRVELDQFARILLMINKKRGYKSSRKAKGEDEGSAIDGMGIAKDLYERNLTPGQLINERLQKGIKSIPDFYRSDLQSEFDIIWNHQKQYYPDILNEELYQEILGKSKTITASILRKKGYDGLELKGNLSEKKVARYALRAKAVNSKCSLEEISEILPEINNNINQSSGYLGAISDRSKWLFFNQLTVGQFLYQQIESNPHAILKNQVFYRQDYLDEFNCIWEKQLEFYPEILTQELKQEIRDVIIFYQRKLKSQKSLLSLCELEGKVIEIVDNGIKKKRKVGPKVCPKSSPIFQEFKIWSQLNNITYNIEGSRKSQGISLELEQMQLLYQELNWKEKLSANEVIRLLNLKGYQLNFNEIEGNRTNASFINALNDFFVKEGHDELVLSKMNSAELIDTLKKLFPIYGIDVSLLNFDSNLGGQNIENQAFYNFWHLLYSFEGDNSKSGIDKLKTALETKFGFPFESNTPITNIKLSDDYGNLSVRAMRKILPFLKEGNRYDLACTLAGYNHSHSETKEDLSTKVLLDRLEILPKNELRNPVVEKILNQMINVINTIFETYGKPDEIRIEMARELKKSAKERENATKAIRQITDEHIKLKRELQAEFGLPNVSRNDLIRYKLYLELKDNGFKTLYSNQPIDRSKLFSSEYDIEHIIPQSKLFDDSFSNKTIELRSVNLRKGNDTAFDFINKEFGEDGLKQYEARVKALFGNQLGKKSKYRKLLMSETEIPKDFIERELRDTQYIARKAKDILSTVVRQVSTTTGSITEKLRDDWQLVDVLKELNWNKYDKLGMTETLENRHGQKVYRIVDWTKRNDHRHHAMDAITVAFTKREYVKYFNNLNAKSEKDGEIYKILKTETYFDKDQKRRFNPPMPLTQFRSRAKEHLENTLISFKAKNKVSTKNKNAIKTAKGKITTIQDTPRGQLHLETVYGSSQYYSSKIEKIGANFDLEKINKVANSKYRKLLLKRLEENGNDPKKAFTGANSLSKRPIFLNALETYTLPESVKLVEFDTRYTIRKPITPDIKIDKVIDKGIQLILQERLNQHDGDAKKAFSNLEENPIYLNKEKGLILKRVTIQGVNNAVALHNKKDHFGKEVRDAKGNPIPVDFVNTGNNHHVAIYKDEKGNLQEEVVPLFEAITRKNQGVEIIKKQHELGWEFLFTMKQNEFFVFPNEETGFDPSEIDLLDPSNFAKISPNLFRVQKIGKGDYWFRHHLETELIDRIELNGSSYKRIRNPKSMNISKKISLNHIGRIVNVGEF

SEQ ID NO: 23997 - protein, 1069 aa, unidentified
  REGION 1..1069: note = Cas Enzyme sequence
MSNVLGIDVGTNSIGWALIEDGKRVIDMGVRIFPVGVKEDDYAKSGSEKSKNATRRDARHARRTYDRYRQRRQHLEKALHENGMMFDKTTSLPAKELYGLRRKGLDERLEKEEFARVLFLLNQRRGFKSNRKGQSNSSEEDKGLIGQMNSFQQELEERGFRTPGEYFASLFDDQPEGWHNENEPTKRIRKEHRVRRSLYETEFDLLWQKQSEFYPELTDDLRDHIRDYVIFYQRRLKSAKHLVSKCRFEPKKRVIPKSHPLFQQFRIWTTINNMRITYGERVNDPFTNQERIDLGAELNSREYMTHSQIKKFMGWPSSTKFNDMPQKILGNVTVSRLESAVGSNWYHALSSSDKERLWHNVYCAEDDEELSEHAQKNWKMTDDQADRLVTVNLEVEYGDLSFKAISKILPHLEDGYDYASACAMAGYHHSFDAEKQGKDRILADKLDLTKQEPLRNPLVQMSVNECARLINAVIDQHGKPDRVRVELLRELKKPKKVREQRTNKLREKQRERDAFKEFLIDKKLVKDPRRGDLMKFELWLELEHSSKDLQRLAPELNLADFKKFRSRVNAKDEEKYRLWLECGRVSPYTGNIIPLSKLFTEEIEVEHILPFSRSLDNSFMNKTLSEAEFNSIKGNLTPMEYFKDRKEELRAFKERVKSFSAGKQEKLLAENIDSDFKNSQLTNTAYIGREVTKMLYSVCKDVKVSSGAVTSLLRRQWGLGRLIWDGTGDKKNRDDHRHHAIDALVVAATTDSVIKQVSDLAQETPYGTIQLKGLKFPWPTFQLEASEHIGHMLISYKNGKRLLSSKKNPYRYARKPMPEQRTRSVRGQLHEDTLYGQIMHPEKGELVYVVKKSLEGLSEKDLPKIIDKGLRDSILEHVKNNGGKWSSLKETVYMKSKKGAKVPIKTVRVEVPAEDMIQLRPNENKKLFVKPGNNYCLAIYEDSKTGKRDFETVSFYTASQNALNKQPLYPSEKKGKPLLMTLQQKDLVVLYDNHPDEIDWNNPCELFDRLYMVRKFDRNGLVGMVKHNRTNVDPGKVKDYEPGAGYTKRVGGLKAVKVIIDIVGKLHRT

SEQ ID NO: 23998 - protein, 1386 aa, unidentified; identical to SEQ ID NO: 22792
  REGION 1..1386: note = Cas Enzyme sequence

SEQ ID NO: 23999 - protein, 1511 aa, unidentified
  REGION 1..1511: note = Cas Enzyme sequence
MKKILGLDLGTNSIGWSLISHNFEKKEGKIDGLGVRIIPMDAGVLGKFDAGLSHSQTAERTGYRSKRRLYQRDNLRRERLHRVLNILGFLPSHYRESIDFDKKLGQFKPGKEVKLNYRETEQGNYQFIFTEAFQEMLAEFKTAQPDLFYLKNNGIETKIPYDWTLYYLRKKALSKPISKHELAWLILNFNQKRGYYQMRGEEADKDDDKEFVELKVDQLVDSGEQMKGKPLYNVIFENGWQFDKQILKTENWVGRTKEFIVTTKTLKNGDVKRTFKTVDSQEDWIAIKSKTEQNINESGKTVGEYIYNTLLINPTQKIRGKLIKTIERKLYKDELRRILFKQIEYNKQFFSNELYQACIKELYPRNEAHQYNIKDKDFLYLFIEDIIFYQRPLKSQKGTIAACPFEERYCKIENNETGKFENKKVPVKTMSKSHPLFQEFRIWQWLKNLKIYNKEVVEKGGLKDVTYQLLPDEDAWVRLFDFLNTKKELDQKQFIDHFVKLRLIDKREKDQFRWNYPEDKKYPFAETRAQLITRIAKVGGIKNPEDFLDEKTKLGKKQTSPSVSRLEQLWHIIYSVSDLKEYKKALKKYAKKHHLDEVSFVENFLKFQPFKSDYSNYSKKAINKLLPVMRIGNYWKENKISIEVKNRATAIMERVDHLNLNENYTSIDLIKALAQVSDDDIPRQLVKSFIPLKNKNPLKGLNTYQATYLVYGKYSEVGDILHWNDSFEITKYLRKFKQHSLRNPIVEQVVTETLRVVRDIWEFYGEKFNIDFTEVYDPIRKRNIKSYKSYFDEIHLELGREMKNPKGKREEISKQNTENENTNHRIKEILNELMTDPNIEGDVRSFSPSQQEMLKIFEEGIFLNPDADYSIVSLDEILKIRKSNAPSKKDIQRYRLWMDQGYISPYTGSPIQLSALFTNLYEIEHIIPQSRFFDNSLSNKVICETEVNTEKGNQTAYEFIKNKGGSIINGHRIFGLEEYESHVNKFFNKNKTKLKNLLSEDIPEGFINRQLNDSRYISKFIKSLLSNIVREEGEQEATSKNLIPVTGAVTSKLKQDWGLNDKWNEIIAPRFERLNKLSLSNNFGFWDQSINAFRIQVPDEISKGFNKKRIDHRHHALDALVVACTTRSHTHYLCALNAEKENYSLRDKLLIKNNQGKYTKHFQLPWEGFSIQAKSQLEKTVISFKQNLRVINKATNKFWSYTDENGKINFGKDGKPQKKLRVQTKGDNWAIRKAMHKETVSGLYNIDTPKNKIATAVRASLDEIKTEKHLEKITDKRIREVILPNHLKNYIDEKGKTNYSTAFSQEGIEDLNKNIATLNEGKKHQPIYKVKLYEVGSKFRISEDQSSAKHEKFVEAAKGTNLFFAVYWDEIKQRRNYETIPLNEVIAHQKQIAHLPKKERTPIQAKTELGRFLFSLSPNDLVYVPTDEELENLNTIDFNQLTKKQSSRIYKMVSSSGIQCFFIQNLVAKSIQNKFEFSALNKMEKSVNEIMIKERCIKLRVDRLGNITKAK

SEQ ID NO: 24000 - protein, 1386 aa, unidentified
  REGION 1..1386: note = Cas Enzyme sequence
MKKILGLDLGTTSIGWALVNEAESEKETSSIIKTGVRVVPLSTDEQISFEKGQSITINADRTLKRGMRRNLHRYKMRRNAVVDVLKEIGFISEPKNLAEVDENLTFSTYAARAKAPNEKISKEEFARVLLMINKKRGYKSSRKANNEEEGQLIDGMAIAKKLYNENLTPGQLSFQLLKDGKKSLPAYYRSDLQAEFDTIWKFQKQFYPGSLTTEHQENLYGKNKGDTIKYFEKTMGLERAENKGSDKKLQQYEWRQKAINEKLELAEVAFILTEINNQINQSSGYLGAISDRSKELFFNNLTVGQYLYNQLKEDPHASLKNQVFYRQDYIDEFDAIWKEQTKHYKELTSEIREQLRDITIFYQRRLKSQKGLINICEFEGIERIVTIDGEKKKKLVGPRVAPKSSLVFQQFKIWQNINAIRVSKRNNETVVYELEEETKKELFKELNWVKQMTDKIFLEWLFKDSEDNPKEWKLNYKHLEGNRTNAELLEAYNKILESEGYEKVIFGKLPAEDNLLALKECFKTIGINPNILDFKIDLKGNDFAQQPSYELWHLLYSYEDDNSPTGTASLLLKLQDKFGFKEEHARLLAGISFPKDYGSLSARAMRKIISYLQEGHPFSGTGEDNNQIGACELAGYNHSNSVTKAENEDRELKEELEILKKNSLRNPVVEKILNQMINVVNAIIKDPELGRPDEIRIELARELKKTAQQRSEMTNQIAKVTKDYQEIRELLKKEFGLTYVSRKDLIKYRLYKELKATGYKTLYSGTYIKPEELFTNKFDVEHIIPQSLLFDDSYSNKTLELRDVNLEKGNETALDYCERKGWLEDFKRRVEEVYSAGDIKYMNRKKLLMTKAEIPEGFLNRDLGNSAYIARQSAQILLNITRKVNLTSGTITSKLREDWELVDVLKELNFEKYKAQGLTYTVENRHGKELNRITDWTKRNDHRHHAMDAITVAFTKPAYIQYLNNMSGNSDKGGDFYGVKEKYTYRDKEGGRKFVKPFNNIRQEAKKHLESILISHKAKNKVVTKNKNKIKEKGKGNFKIKTELTPRGQLHKETIYGSSKEYTTKLEKIGGTFDTEKINTVAKKKHREALLKRLEEFDKDPKKAFTGKNSLAKNPVKLNDKGATLPEKVNTVSLSNRFTIRKNITPDLKINKVVDVGIRKILQKRLEDFGRKPKEAFSNLDDNPIWLNEKKKIPLKRVTITGVSNAEPLHNAKDHLGKEIKDEKGEVIPVDYVSTGNNHHVAIYKDEKGNLQEEVVSFYEAVIRKNLGQPIINRNHEKGWEFLFTMKQNEMFIFPSEEFNPLEVDLLDPANSTSISKRLFRVQKISTKNYVFTHHLETEAVGAETFKNKKELAGITYQFHQSEKHLQGIVKVRINHLGDIVQVGEY

SEQ ID NO: 24001 - protein, 1411 aa, unidentified; identical to SEQ ID NO: 22791
  REGION 1..1411: note = Cas Enzyme sequence

SEQ ID NO: 24002 - protein, 1268 aa, unidentified
  REGION 1..1268: note = Cas Enzyme sequence
SFRSPSEDDWTLLKKKTEADIDKSQQTVGEYIYDSLLKKPDQKIRGKLVRTIERRFYKEELVKILEKQKDFHSQLNDDKLYNKCLQELYCFNESHRNSIGNKGFVHLLVNDILFYQRPLKSKKSLIANCPYESRIYMKDGQRLSEPIKCIAKSNPYYQEFRLWQFLHNLRIYSREEIVNGKTETDVDVTAKFLTNETDWVALYEWLNDRKEVEQKTFLKYPAFNIKKDIEKYRWNYVEDKLYPCNETRGAILSKLKQCASVPNDFLTPQKEMELWHLLYSVEDKHELVKALSSFSAKYTLSDDFVEQLRKFPPFKKDYGAYSEKAIKKLLPLMRLGIYWREDEIPPEAKYRIDAVKERLTLATEDSIKIEELADDDIPKQVIKSFLKCKYLIKGFNTYQACYAVYGRHSEISDLQQWQCPADIDKFIADFKQHSLRNPIVEQVVVETLRVVRDIWNYYGKGTAHFFDEIHIELGREMKNPADKRKRMTEKITENENTNLRIKALLLEMLNDNTYSEIRPYSPSQQEILKIYEEGVLQSGIEVPDDIQKIAKQNQPSKNELIRYKLWLDQKYRSPYTGEVIPLSKLFTSAYQIEHVIPQTRYFDDSLSNKVICEAEVNADKDNRTAYEYIKKNAGKIIELNYGRKVKLFVLEDYEQFIKQHFGKNQSKMKKLLMEDIPDEFINRQLNDSRYISKYVKGLLSNIVREDGELEATAKRIVSCNGAITSVLKQDWGLNDVWNELVAPRFIRLNQLTNTNNFGQWTNKGGKRVFQTEMPLELQKNFSKKRIDHRHHALDAVVIACATRDHVNYLNNEFAAANKKEIRFDLRRKLRRVESKDILRKIDGVDVPKKIEVAKEFFKPWDTFTQNTREALSSVVVSFKQNLRVLNRTVNNYQHWQKDANGHLKKGVVTQKGTNWAIRKSMHKDTVAGRVVLKKKKTVSLPAAVDVAMANIHLIVDKPLKKFLQSLMDKKMDKKQIIKYFKERENQFNEADITKVDVYYFDDTLAASRVLINESFNSETICSSITDTAIQKILLNHLANYNSSENGKIKEHPELAFSPDGIDEMNKNIVGLNNGIKHAPIFKVRKYEPVGNKFVVGSVGNKSSKLVEAAKGTNLFFAIYQNEESGKRSYETIPFYQVVEIEKQNAELIKGGAKRSELAPVPSVNANGDRLLFYLSPNDLVYVPTEEEQEMSHPINFENLTTEQTLRIYKFVSCTSNEGHFVPNFYSSPILKNEMGTNNKSQNTIDNQRQIKAVCWKLEVDRLGNISNY

SEQ ID NO: 24003 - protein, 1524 aa, unidentified
  REGION 1..1524: note = Cas Enzyme sequence
MKKILGLDLGTNSIGWALIEQSFEINEDKVVDKKEGSIIDLGSRIIPMSQDILGIFDSGQSYSQTAERTGYRGVRRLRERSLLRRERLHRVLNILDFLPKHYSSEIDFEKRVGQFTGESEPKIAYKLNIETNKFEFIYQDSFNKMLQDFIKYQPELVKDDKKVPYDWTIYYLRKKALTQKIEKEELAWLLLHFNQKRGYYQLRGEEDEDATRTAQTRTYFLTQEIESINDTQQLYKGLKVIQIKLSNGEIGKYFNKEIPKWIGLKKNIIVTIDTDKDGNDKLDKDGNVSKRFSIPTDEDWEKKWKLIKIKTEKEIKDSNKSVGSYIYDTLLQNPNQKIKGKLVRVIERKFYKDELKTILETQKKFHTELQDATLYNACLEELYEHNDAHRNNNQQKDFTHLFLNDIIFYQRPLKSKSSLISNCKYEARFYKDKEGNIKSEPIKCIAKSHPIFQEFRLLQWMKNLKIFIKETDEEVTSHFLKTEEDWANLFDWLNEKKEISQDQFLKYSAFNLKKDWNKYRWNFVDDKSYPCNETRTQITSRLSKVENVPENFLTKETEEKLWHILYSVEDKDEIKAALKTFASKHSLGDDFVENFKKFPPYKKEYGSYSAKAIKKLLALMRFGNNWNEVNINNKIKERINKIIDAEYDEKIKDRVREKAINLNKLEHFQGLPLWLASYIIYNRHSEDGESKKWNIASEIEFLQQHSLRNPIVEQVINETLRVVKDIWNTYGNGEENFFDEIHIELGREMKNPASDRKRMTEQNTRSENTNLRIKAMLSEFLNDSTIENVRPYSPSQQDILKIYEDGILASYNEKDIDEDILKISKSSQPTKSEISRYKLWLEQKYCSPYTGEIIPLNKLFTPAYEIEHIIPQSRYFDDSFSNKVICEAEVNKEKDNQLGLEFIKNHHGQKITLNYGKTVQIFDELQYEDFVKKQYANNRSKLKKLLLEEIPESFIQRQMNDTRYISKVVKNLLSNIVREKDEQETTSKNLLSSNGNITSTLKQDWGLNDVWNDIITPRFERLNELTKSNNFGEINKNTNKFLPQVPLELQKGFNKKRIDHRHHAVDALVIACATRNHINYLNNQNALEKNKKQNDKEKLKNRFDLKSKLCFKKFNDENKDNYKWIFHKPWQTFTQETKEQLFTTIVSFKQNVRVINKTINHYQHWKEEDGKQKKVLIKQDKGDSWAIRKPMHKETVSGQVNLRLNKTVNLSVALDNWKMIINKNLKSHIKELVKNKYDTKMLQKYFKDRKNTWNNIDVSKVEIYYFDNNFVASRVKLDDSFTLSKIETITDTGIQKILTNHLENHKGKLDTNGKVIAPETLAFSPDGIDELNKNITALNNGKFHQPIFKVRTYEAKGNKFNVGIKGNKKDKFVEAAKGTNLFFAIYYDEENKKRNYETIPLNIVIERQKQGLSSVPEKNEKQHNLVFGLSPNDLVYVPTKEEFEDASLVNFDNLNKVQINRIYKAVSFTGNRLYAVPNNVATSIVDKTEFTQLNKLESSIYKISIKEFCWKLEVNRLGKITKVV

SEQ ID NO: 24004 - protein, 960 aa, unidentified
  REGION 1..960: note = Cas Enzyme sequence
KALIEFLLKQKLGLKKTPKTEVDKYRWNYVEDKKYPCNETKAQIKSRLDKVLGVPEDFLAEELLHQLWHIIYSVTDKTEFEKALRTFAIKNNLDIDTFVSSFKNFPPFKSDYGAYSEKAIKKLLPLMRMGKYWKLEGIYEKTQNRIDKIITGEFDEEINNRVREKAINLTHTTHFQGLPEWLAKYVLYGRHSETIDGIKWKSVLELEEYLNSFKQHSLRNPIVEQIVTETLRVVKDIWVHFGKGAENYFDEVHVELGREMKNTADDRKKMTQQVTENENTNIRIKALLMEMMNDANIENVRPHSPMHQEILKLYEEYAINSDEKFVGKDANGNDLFVSEVTPDDIIKISKLAQPTKSELIRYRLWLEQKYRSPYTGQMIPLGKLFTSAYEIEHIIPQSRYFDDGFSNKVICEAAVNKLKDKQLGLEFIRNHHGEIVPTGNGKEQVRIFTEEEYVSFVKEHYAKLRGKKTKLLLDEIPDQMIERQLNDTRYISKFVNSILSNIVRSDNNDDGLNSKNLIPGNGKITSTLRQDWGLNDVWNEIILPRFERMNFLTQSTAFTTKNREGHTIPTIPLELSKGFQKKRIDHRHHALDALIIACATRDHVNLLNNQSAKSENTRYDLQHKLRNKDKWIDHNGKERLKFASFQLPWPSFAKDTKNGLEHIVVSFKQNTRVINKTKFAGLTYKESKEKSNNMNWAIRKPMHKDTISGKVDLPWVKVPKGKLLTATRKNIDTSFDEKTIKSITDTGIQKILLNYLKVKGSPEIAFTPEGLDELNRNISNYNNGKSHQPLYKARVFELGSKFAVGYAGNKKHKFVEAAKGTNLFFAVYADGSGKRSFDTIPLNEVIERQKQGLPPVPETNEKGLKLLFHLSPNDLVYVDDGKDSFDLYKLTDNQKVNIYKVVSFTGSRLYAVPFFIAKSIVDKNEFTQLNKIEFTDEKLSIKEHCYKIYMDRLGNEVKKR

SEQ ID NO: 24005 - protein, 1433 aa, unidentified
  REGION 1..1433: note = Cas Enzyme sequence
LYLGAKLKRNNDISKYSDKKMKEKVVGIDLGTGSLGISVRNLSLGESLEKQLEWFSVTTFESGTSSDQTGEHTLAADRRSHVQSRRLKEHSRWKRWSTLSLLIDYNMCPMSRQSLERWCTYDKSRGLKREFPVDDDAFMRWLRMDFDGDGKSDLTAFQLRRKLVEEQFDFTKPINRYKLGRAIYHIAQHRGFKSSKGETLSGQEEDVKDVQVNADNLEETMKKSEERKSKDLSEYMAKHGFKTVGQAFASLEDAGIRVRNSRYQAVRSQNVAEIDEYFHFQEGLREYEDLHKRLVSTKKGEGTLFYKLPLRSQKGHIGKCTFEKNKRRCPISHPEYEKYRAWGFINNIKYRECANGCWQELPLELKKLLYQKVFTAYVRKDFPFEKIREFLEKQLGMTFKNVEGIKTINYKDKTLVAGCPVTARLQNIAAIFDTNIEKLYLQGTKTRLSHSIKNTEKHSVTYNAEDLWHFCFEADEIEDVKRFAHSSLGWEEKATDALCKLWASIEQGYAPLSVKALRNINRMLEYGLKTSDAIFLAKVPDITGIEEHSILQLIEQYEKEVKAPSDRNLRIGRIVNTLISKYKSLAPRDRFADHDFGYQLQQDDKDDIVQCIMDNDSLFTLMDATEQQQMINEVTRLYQSFFADIHRDYVKTPKLADTLAEKLKEKFTAVDESKWKLLYHPSMVSDFPRNKEDEGLLGSPRIGAIRNPTVLRALNVLRKTLNTMILDGLIDPQETRLVVETTRVNNDINKRWAIEKYNNERRDANKAIWNILKEYYPDKDIKDEDVDAARYVLEQSGEDIYTDDKPDDLHYRSQIKKYKLWLEQGCCCLYTGRVISLSNMLSENYCDLEHTIPRSLSFDSSDKNLTICDAYYNRHIKQNRIPTQLPNYEHDVTIDGQVYTAIKPRLKNWEEKVERLSQNVLFWKNRARRARTEDSKNACIRQKLLWHMEFDYWRQKLDRFKMKPENLTDGFRNSQLVDTGIITRYAVLYLKTLFSSVDVQNGQSTSAFRKIFGIPQKDRSSNYHHAVDATILTMIPQSAKRDRMLKLFYQIDELKRDCHDVSGLQFQLNKELEDCDLGRGLAGIDDFIARQVMVDYYKQDRTLQKNVRPVIRKGKPLMNKTATGKLEPVTFCSDSIRGELHKQTFFGAIRRREDQKTLFVVREPLKYKTSNKDSGFKDWKELNDRLVDLNFKDKGSDLKPMVKMMMNQFPKGTSFKEACEQGIYMLDKDGRKVNRIRHIRCYGKNVTNPMRVKRHTYPSDKEYKQYVWAALADGSVYALCEYVNGSSKVYKRYTYMDISENRKMGLEDIPVCLTDKNGKQFNLRRKICKGDMLLIYRDAPEELLHLDRAELSKRLYKVQSFERKNDIILRHHLLSTGETNSDDGKEKKRDRGESIKDFAKLPNIIRSSITSFKYLQKDVDYVFNKEGLRLMTI

SEQ ID NO: 24006 - protein, 1346 aa, unidentified
  REGION 1..1346: note = Cas Enzyme sequence
MKNILGLDLGTTSIGWAYIRESDKEVTGSQISDMGVRIVPITSDEENDFSKGNKISINADRTLKRGARRNLQRFKQRRNAILEVFKKEGLVPSNFLYAEDGPSSTFSTLKLRAKAVQERIELDELLKVLLQINKKRGYKSSRKTKAEEDEGSAIDSMGIAKELYENEVTPGQWVYNALIRGRKNIPDFYLSDLQEEFKKIIGFQGQFYPEILNASFVDEWMGKPATPTKQFFNKIGIPLAENSGKRVERKLQEYQWRSTAVISQIDLPQIALVLAQINAQMSNSSGYLGAISDRSKELYFKNLTVGQFLYQKIKKKPHRRLKGQVFYRQDYLDEFEKIWSIQSLFHSQLTDDLKKTIRDISIFYQRRLKSQKHLVSNCEFEDNHKVVPKSHPVFQEYRIWQNLNNLILIKKDNPNEKLDIPLENKIFLAEQLAFKKEMSVSDTLKLMKLKPKEWELNFQKIEGNRTNHAIFEAFARIIELEDGEPIDLTKMKADDVLDQFSEAFLRIGIEPQLLQVNHEIEGKEYEKQPYIQFWHLLYSSEDDEKLKKCLIKKFGFKKEHSKFLLGISLQDDHASLSSRAIKKILPHLQSGLIYDKACSYAGYNHSSSLTTEDNENRELKPELELLKKNSLRNPVVEKILNQMINVVNAIIKEPGLGRPDEIRIEMARELKANAEQRKTMTSRIASATRDHERFRDILKNEFGLPRVTKNDLIRYKLWLETDGISIYTGKPIKASKLFSKEYDIEHIIPKARLFDDSFSNKTICERQLNIDKANITAFSFLQDKFSSKEFEQYQERVKGFHGKISKAKIQKLLMANDKIPEDFIARQLQETRYISKKAKEILFDVTRRVTITSGIITDKLREDWGLVDILKELNWEKYDKLGLTYTVEGKNGERLNKIKDWSKRNDHRHHAMDALTVALTKPAYIQYLNNLNARAKEGKKGSQIYAIEQKYLIRDNGKLRFISPVENIRAEAKKHLSRILISYKAKNKVVTINKNKTKKLNGFNEQIVYTPRGQLHKETIYGMSYSYVTKIEKVGGAFDEQKIKTIANKKERDALLKRLTENNNDPKKAFTGKNALNKTPVYLNLENNIKLPDKVKTVSLKKNYSIRKEIGPDLKVEKVIDTGIKRILVNRLNEFGGNAKLAFSNIDENPIWLNKAKGIAIKRVKISGISNVESLHTKKDHFGQPILDNNGKEIPVDYVSTGNNHHVAIYEDLKGNLQEEVVSFFEAVVRKNQGLPIINKNHSEGWKFWFTLKQNEFFVFPNADFAPSDVDLLDENNYHLISPNLFRVQKIGNKDYTFRNHLETILSDSKQLEGLAYFRYRSPEKLKAIKKIRVNNLGKIIQVGEF

SEQ ID NO: 24007 - protein, 1398 aa, unidentified
  REGION 1..1398: note = Cas Enzyme sequence
MKKILGLDLGTTSIGWAFVKEAEDDNEVSSIIKIGVRVNPLTTDEQTNFEKGKKFSVTAGRTLARGARRTLQRYKQRRQNLINVLKKSGIIDEDTLLAESDKNTTHATYALRAKAADQKIGKDEFARILLMINKKRGYKSSRKANNEDEGQLIDGMAIAKRLYEQKLTPGQLCYQFLKEGKKTLPDFYRSDLNAEFNSVWDLQSKYYPDVFNDDLKKALGGKGQKVTSAIFWTKYNFNTAENKGTREDKKLQAYKWRSMAINTQLAVEEAAFVIADINGNINNSSGYLGAISDRSKELYFNKQTIGQYLYSQLQYNPHTRTKGQVFYRQDYFDEFETIWETQAKYHPELTNALKEEIRDIIIFYQRKLKSQKGLVSFCEFESRVVELVKDDKKISYTIGAKVTPKSSPLFQEFKIWQNLNNLLIQHKKSKEVLSFDLEAKQLLFDELNIKGNLKKEQVFKLLGYKLNEWDLNFPVVEGNRTNQLLYEAYLKMMIYEGHDDIEIEELTAADIKLTVRSFFEMQEINIAILDFDSNLEGGAIEKQLAYQVWHLLYAYEGDNSNTGNDKLFELLKSKFGINKEHAQILAKVNLNQDYASLSAKAIRNILPFLKAGHPFAKKDKDEKIASATALAGYNHSSSITKEENDNRILKDCLELLPKNSLRNPVVEKILNQMVNVVNAIIADPNLGKPDEIRIELARELKKNLKEREEATAQINKSTAEHDTIRLLLVKEFGIKNPTRNDIIRYKLYDELKFNGYKDLYTNEYISREELFSKKYDIEHIIPQSRVFDDSFSNKTIVERRINQEKDNATAYDYVDAKGAEKLSQYKLRVEAYLKEYPERKAKYKKLLMKGEAIGEGFIDRDLRDSQYIAKKAKAMLHEVCRYIVSTTGSVTQRLREDWDLVNVMQELNLEKYRKQLLTEMVEKKDGNFKERIIDWTKRNDHRHHAMDALTIAFTKHSHIQYLNNLNARKSDDKLGRAIAGIEKKETDFQIDDNGNKKRRFKSPLANFREDAKNHLENVLVSCKAKNKVVTKNKNKIKSAKEKEPQKTLTPRGQLHKETVYGKIQQYIVKEEKVSGKFDEATIAKVTKPKYREALLKRLRENNNDPAKAFTGKNALTKNPIYLDVQNTVLLPEVLKLSWLEDDYAIRKDISPDLKIEKVIDEGIREILYKRLNEFGGKGKEKEAFSNLDKNPIWLNETAKIAIKRVTISGIKNAEPLHFKKDHHGRDVLDKSGKPTPVDFVSTGNNHHVAIYRDENGNLQDEVVSLYKVITERVNQGLPIVDKTYNQHLGWQFLFTMKQNEYFIFPSADFYPLEIDLLNPVNNKLISSHLFRVQKFSKVIYGNSAVRDYVFRHHLETAIEDKKELKDVTYKSIKSLPYFENIIKVRINHIGQIIKVGEY

SEQ ID NO: 24008 - protein, 1353 aa, unidentified
  REGION 1..1353: note = Cas Enzyme sequence
MQKILGLDLGTNSIGWAIRDIDEIENQIIDKGVLTFEKGVATTKSGEEPMVKKRTECRSKRRNYQAEKYRKWEMLKCLIENNPKMCPLTINELNGWRKYNKDNGRIYPQRKEFINWLKLDFDSDGKIDFENPYHLRKVVAENKIDNPLILGRAFYHLVQRRGFRGRDEEESKTIMGGSKETGTIGADVIHKIIEEQKTTLGGALYYDLKYNGKRIRKRYNLRTDFEAELKTICSVQGIEESSELFKRLYKAIIWQRPLRTQKGNIGRCTYEPSKQRCPISHPLYEEYRAWCFINNIKIKSVAEIDSSFEPLSEEQRISIYEKKFFRKSKAQFEFNDIRKLLDSKGNLYVFNYKDNTSIAGCPVTASIKEIFGNLEEIKIPHTPNEKRSANKAYYNYEDIWHILFSFDSKEKLFELAKVQLKLDDENSKKFCKITLQQGYASLSINAIKKILPYLRKGFIYSDAVYLANLKKVLEKEPSEKETNKIIENIRLQIKLQKEEKDLIGTANSLIARHLNLEAHDKYARNPEYALRQKDYDDVENELINNFGSKTWNEKDEETKTKYRLRIQELYQVYLQTPVNVEKGLLFNKVPRLDERIKTYFKNEWNAKDENLKHLYHPSETEIYPPAKEMGGKKYLGNPMPISRGFKNPMAMKTLHHLKRFINYLLDQEKIDENTRIVIEIARELNDANKRKAIDRWQKEREKQNKEYSDAISEIVEKHGLNIDPSKDDIIDKYRLWIEQERQCIYTGNIINCTELFDGTKFDFEHTIPADLSFDNELKNLTIADSKYNREIKQKQIPTDLPNYERDTIIGDEKYTAIQPRLKFIDERVEHFENQVEFWKKESKKAGTKDRKDYCIQQKHYNQFELDYWKKKLDTFTMTEYKAGWRNSQLRDTQIITKYALPYLKTVFNKVEVQKGIITAEFRKIYNVGFEKDRSKHTHHAVDAAILTLIPPAVSRDKLLKAHFEAVENNIRFHSLPPEWKNYNPQYIKNIEEETLINYINQDRTLVPTVKYVRKRGRIQYVKEKLSDGKWIYKLDKHGKKIPIIAQGDCIRGQLHKESFYGAIIEYNKANGDENIIYVGRVLLKDFASEKDFRHIIDPVVKKVISESIKNRMENGKSFKEAIAEDIWMVDKMGNPRTKDKHGNMLFPIRHVRCKVAAGRGYLTKAIPIKEHVFLSKHEYKQRYYVQNEINYLYLLYEWQNENEVKKTHRIINLFEAKELGIKDSNELFELPDFRLLNKGNGKNNKDFELKSIIKVGMRVLVWKELSEELRDLNKKELLKRLYKVFKFNEIGPTGYIYLQFHKEARTDKELGEGDKIFEPDTEQPRLRFSADNFNCLVEGKDFDITVDGEIIFK

SEQ ID NO: 24009 - protein, 1231 aa, unidentified
  REGION 1..1231: note = Cas Enzyme sequence
MKNVLGLDLGVSSIGWALIDEDDKKIIGLGSRIIPLTTDDKDEFSRGNAISKNQNRTLKRIQRRCYDRYQLRRKNLIFILSQNNMLPDITLIQLPKIELWKLRNDAVKIKLSLPEIGRLLLHLNQKRGYKSSRSEANMDKKDTEYVKKVKSRHELIKEKGLTIGQYFYENLKVDENYRLKEQVFPREAYIEEFDTIINSQKKYHSQILTDNLIHSIRDEIIYFQRRLKSQKGLVSVCDFEGYYEKFISNDIEKEIFVGPKVAHRSSPLFQVCKIWETINSISLRYKNGIDCEISLSKKFEIFNYLDNNEVLSYLELLKILNLKKDEVYGNKQLAKGLQGNKTKLALKKCFNNPDDFKHLFVFNLNITESDQEGYLIEKNTGEIVSTKNKKYIVADVEAQPLFKLWHVVYSIQDKQNCKQALIKKFKVPEEIAERLASLDFTKQGYGNKSHRAIRKILPFLMEGDVYSNACSYVGYNHSGSMTKRENMERLLAAKLLPIQKNSLRQPIVEKILNQLVNLVNAIIEKYGKPDEIRIELARELKQNKEERNETYKNITKRERENVIIEKELEEFGLRATRNNIIKWRLYHEISNEEKKQNAICLYCGQPISFSAALLGEEVEVEHIIPKSKIFDDSQSNKTLTHRRCNANKKDQTAYDYMKSKSETEFLEYIERVNILYKNGLIGKSKRDKLLLPEIKISKDFITRQLRETQYITKKAREILNSICHNIWVTSGTVTAELRHIWGWDEVLENLQLHKYRSLGLTETITISDNNNSIHKEKIIGWSKRDDHRHHAIDALTIACTKQGFIQRINNLSSNSNRNQMIHEIKDYDERKNLLENYLYSQRPYTTRQVEEAVANILVSFKSGKKVASVGIRKVKRDGRKIVVQNNIIVPRGPLSEESVYGQINCLEFGKPVKYLFENPNLIFKSYIKKLVEERLLINNSDIKSSLASLKKSPIYLDENKTSILKYATCFKKEYVLKYPVQSLKVKDVKSIIDNRVREIISNRLNRFNNNEKVAFKNLENDPIWFNEEKKIPIKTVRCFTGLSAVESIKKNEFGKDIGFVKPGNNHHLALYKDEFGVTQISICSFWHAVERKKFGIPIIIKNPAQVIDSILEDEDKYHESFLEKLPNGKWTYIESFQQNEMFILGLNIEDYELASINNKYNILSNYLYKLRSIAGDPQLDLYFEHHLETSKVKTEYAKLSKRYILVKSIGALFNLNPIRIKINYLGEIIKF

SEQ ID NO: 24010 - protein, 1429 aa, unidentified
  REGION 1..1429: note = Cas Enzyme sequence
MKNILGLDLGTTSIGFAHVIESDDPLKSIIKQIGVRVNPLTTDEQTNFEKGKPITINADRTLKRGARRNLDRYQDRRANLIHALFKANVITKETKLAEDGKSTTHSTWRLRAQSVTEKIEKDDLARVLLAINKKRGYKSSRKAKNEDEGQAIDGMEMAKKLYEEKLTPGQFGYALLQAGKKNISDFYRSDLEEELDKVWAFQKNYYPEIFTDEFKKELEGKGQRATSAIFWVKYRFNTAENKGTREEKKVQAYKWRSEAISQQLEKEEVAYVITEINNNLNNSSGYLGAISDRSKELYFNKQTVGQYLFKQLLKNPHTQLKNQVFYRQDYLDEFELIWSEQKKYHPELTDEPKVEIRDIVIFYQRKLKSQKGLVSFCEFERKEIEIETGKKKIIGLKVAPKSSPLFQEFKIWQVLHNVLIKKKESKKRMEKKENQSSLVESEKEIFAFSLEERKHLFEELNLKGNLPSKTVFELLGHKIQDWEINYSVFEGNRTNKALYEAYLKILDIEGYDVKELLEVKSNKDEVELDDIQIAASEIKNMIKQIFEILKIDTAILDFDPELDGKEFEQQASYQFWHLLYSYEGDESASGNEKLYELLEKKFGFKREHSQILADVTLSDDYGNLSSKAIRKIYPYIKENNYSTACELAEYSHSASSLTKEEIANRPLKDKLEILKKNSLRNPVVEKILNQLVNVVNALIEKNSKRDESGNIVEYFKFDEIRIELARDLKKNAKERAEMTSSINTAKTNHEKIFKLLQNEFGVKNPSRNDIIRYRLYEELKNNGYKDLYTNSYISREILFSKQIDIDHIIPQAKLFDDSFSNKTVVFRKDNLEKGSKTAYDYISAKHGAIQLADFETRIASLFEIGKKNKEEGISKAKYQKLQKKESQIGDGFIQRDLRDTQYIAKKAKNMLFEIARSVISTTGSVTNRLREDWDLINVMQELNFDKFKKLGLTEMVEKKDGTLKERIKDWNKRNDHRHHAMDALTVAFTRHNHIQYLNNLNARKQESNKLHRNIIGIETKETHVAIDDTGNKKRVFNLPIPNFREQAKAHLENVLVSHKAKNKVVTKNKNRTKLKTGEKIKVELTPRGQLHKETVYGKYRYYTSKVEKVGIKFDLPIIGRVANPRYKQALLNRLSESGNDPLKAFSGKNSPSKKPIYLNDEKTAILPEKVKLVWLEEDYSIRKDVTPENFKDEKSIEKVIDIGTKRILLGRLAEFGGDSKKAFSELDKKPIWLNKDKGISIKRVAISGVKNAEALHYKKDHLGNEILDKRGNQIPVDFVSTGNNHHVAIYINDKGEIQENVVALFEALERVNQGLPIIDKTYNQYLGWVFLFTMKQNEYFVFANTSTGFNPKEVDLLDSKNMLAISPNLFRVQKFTKKDYFFRHHFETTVEDNSNLKGTTWKREGLSGINGIVKVRLNHLGEIVKVGEY

SEQ ID NO: 24011 - protein, 1454 aa, unidentified
  REGION 1..1454: note = Cas Enzyme sequence
MKKILGLDLGTTSIGFAYVIENEKDTTKSEIKQIGVRVNPLTTDEQTDFEKGRPMTINADRTLKRGARRTLDRYQDRRSNLIHALYKANIITEETKLAEDGKNTTHSTYALRAKSAHSKIKKDELARVFLAINKKRGYKSSRKAKNEDEGQAIDGMAIAKRLYEENLTPGQLAYQLLLDGKKMIPDFYRSDLQLEFDKVWDFQRKFYPEILNDNFKKELVGKGQRATSAIFYKTYDFNTAEIKAKSREEKKLQAYKWRNDAISKQLEKEEVAFVITEINNNLNNSSGYLGAISDRSKELYFNKETVGQYLYHQLQKNPHTKLKNQVFYRQDYMDEFETIWTEQAKHHVELTNELKAEIRDIIIFYQRKLKSQKGLISLCEFESKEIEIEKNGLKAKKIIGLKVAPKSSPLFQEFKIWQRLNDVIIRKKGTKKRISKKTETQSVLFNEDKEVFNLDLDTKKILFEELNLKGNLTSSKIIELLGYKPSDWEMNFSELEGNRTNASLYNAYLRILEIEGYNEDLLKLSDKDDINVAELKTSAIEIKNMVKRVFEILGIDISILDFDPELEGKDFEMQSSYQLWHLLYSAEDDSKKYSNDEKLIYGNENIGLKQQLCSKFGFNPEHAKIMASISLSDDYGSLSSKAMRKIITHLKEGFGYGGSKDRPNELSACEHAGYRHSASSLTKEEIDNRPLKAKLELLKKNSLRNPVVEKILNQVVNVVNTLIEKNSIKDDQGNIIEYFKFDEIRIELARELKKSTDERKDLTTNINAAKIIHDKIYKLLQTEFGIKNPTRNDIIRYKLYEELKNNGYKDLYTNNYIPREILFSKQIDIEHIIPQSKLFDDSFSNKTVVFRKDNLDKSNKTAYDYIESKFGDQALLDYQQRIEHLFEQGKKTKEDGISKAKYQKLLKQESQIGDGFIERDLRDSQYIAKKAKNMLYEITRSVVSTTGSITNRLREDWDLINIMQELNFEKFKALGLTEMVEKKDGSFKERIIDWSKRNDHRHHAMDALTVAFTKHSHIQYLNHLNARKDETNKLHNNIIGIENKETELRTDENGNRKRRFIEPIPNFRHVAKEHLENILVSHKAKNKVVTKNKNKIAGKDKPQIVLTPRGQLHKETIYGKYKYYVSKEEKVSAKFDLNIIKKVGNPTYKKLLRQRLAENDNDTKKAFTGKNSLDKKPIYIDDTKTEKVPEKVQLVWLEEDYSIRKDVTPENFKDEKTIEKVIDKAVKEILLKRFRDNNNDSKKAFSDLDKNPIWLNSEKGISIKRVTISGVNNAEPLHYKKDHLGNQILNKEGKPIPVDFVSTGNNHHVAIYQDEKGNLQERVVSLFEAVQLVNAGEPIISKDYNQGIGWKFLFTMKQNEYFVFPNEKTGFNPNEIDLLDSKNTKIISPNLFRVQKFGSLLSGFWFRHHLETSVDVNNNLKGITYKVIQSTSHLQNLIKVRINHIGEIVKVGEY

SEQ ID NO: 24012 - protein, 1358 aa, unidentified
  REGION 1..1358: note = Cas Enzyme sequence
  REGION 192..195: note = misc_feature - Xaa can be any naturally occurring amino acid
MKKILGLDLGTTSIGWAFIKEPEKGVAGSEIVEMGVRIVPLSSDEENDFAKGNTISINADRTLKRGARRNLQRFKQRRNALLIIFKEKNLIPSNFNYAEDGPSSTFSTLKLRDKAAKEKIEIEDLVKVLLQINKKRGYKSSRKAKSEEDEGSAIDSMGIAKELYENDLTPGQWVYEALKKGRKNVPDFYRSXXXXEEFRKIVSSQSAFYPEILNPSFIEDWMGKPSTPTKHFFNKKGVQLAENKGKREERRFQEYKWRAEAVSSQIDLSEIALILSQINNQISNSSGYLGAISDRSKELYFKNLTVGQYLYQQVQRNPHTRLKGQVFYRQDYLDEFEKIWSVQSEYHPQLNDDIKKEIRDVTIFFQRRLKSQKHLISNCEFEDHHKVVPKSHPIFQEFRIWQNLNNLHLIKKENLNEKFELALEGKIALANELAFKRDLSVKEALNILGLKPSEWELNFTKIEGNRTNHAFFEAFTKIIELEDGEPLDFGNMKSDDILDQFSEAFLRIGLEPGLLQVNNEIEGAEYEKQPYVQFWHLLYSSEDDQKLKQNLIRKFGFKPEHAKILASISLQDDHASLSSRAIKKILPHLQSGLIYDKACTYAGYNHSSSFTKDENEKRELRAELELLKKNSLRNPVVEKILNQMINVVNAILKDLELGRPDEIRVEMARELKANAEQRKNMTSNIASATRDHEKYKEILKKEFGLKRVTKNDLLRYKLWLETDGISLYTGKPIEASKLFSKEYDIEHIIPKARLFDDSYSNKTICERQLNVDKANITAFSFLQNKLSADEFEQYQSRVKSFYGKLSKAKIQKLLMANDKIPEDFIARQLQETRYISKKAKEILFEITRRVTVTTGTITDKLREDWGLVEIMKELNWEKYDKLGLTYTIEGKHGERLNKIKDWSKRNDHRHHAMDALTVALTKPAYIQYLNNLNAKAIDDKKGSEIFAIEQKYLKRENGKLCFIPPIENIRTEAKKHLSRILVSYKAKNKVVTINKNKTKKKAGFNEQIALTPRGQLHKETVYGKSFHYSTKFEKIGASFDVQKINTVAKKEEREALLKRLAENGNDPKKAFTGKNALSKMPIYLDLERNIKLGEKVKTVTLEENYTIRKEIVGVSPNSKQIVPDYKSIEKIVDSGVKLILKERLDQYNGDSKLAFSNLDENPIWLNKEKGISIKRVKIHGVSTVESLHVKKDHFAEPILDQEGNEIPVDFVSTGNNHHVAIYEDEKGNLQEEVVSFFEAVIRKNQGLPIINKNHSLGWKFLFTLKQNEYFIFDSYGFDPADIDLLDERNYHLISPNLFRVQKIGTKDYTFRHHLETVLNDSSELDSVAYLRLRSPEKLKNIVKVRLNHLGKIIQVGEY

SEQ ID NO: 24013 - protein, 1533 aa, unidentified
  REGION 1..1533: note = Cas Enzyme sequence
MKKNLGLDLGTNSIGWALVNHNFENKQGEILGMGSRIIPMSANILGDFEKGNPVSATADRTHFRGVRRLIERDLLRRERLHRLLNIIGFLPQHYANDIDFEHRLGQFKKDKEPKIAYRKNSNGKFEFIFQKSFEEMVADFRETQPQLFYTKPNGEETKIPYDWTIYYLRKIALSQKIEKEELAWILLNFNQKRGYYQLRGEDEEIEDNKNKSFEILKVAKVVDSGDKIRGTDTILYDVFFENGWKYDRQTTKPEDWIGKTKEFIVTTTTLSTGETKLSFKAVDSEQDWIAIKQKTEQDISNSDKTVGKYIYDTLLQQPNQKIRGKLIRTIERKFYKDELRQILEKQKEFHSELQDRNIYNSCIEELYEYNDAHRNSISNRDFTYLFVDDIIFYQRPLKSKKSLISNCSLEFRTFKVDGVERREGIKCIAKSNPIYQEFRLLQWMKNLKIFKIDDKQDIDITDELLPSIADREKLYEWLNDKTEIDQKAFLKYPDFNLDERIKKEIGLEQFRIFKKDKEQGLHTYYRWNYVADKKYPLNKTRGEILKRLTKIGISSDFLNRNNETHLWHILYSVEDRNEIISALNKFANKHNLPEIFVDTFRKYPRIDKEYGAYSEKAIKKLLTLMRFGKWWDFSAIDENTKDRVDKIQTGEYDEKIKNRVREKAINLTGNNHFQDLPLWLASYIIYNRHSEASEIKYWRTANDIELLKQHSLRNPIVEQVINETLQTIRDIWNHYGEGKENFFDEIHVELGREMKNPADKRRKITERVMENENTNIRIKAILTELLNEGDNNVRPYSPMQQEILKIYEEGVYHNENRADELNEIDKIRKKSQPSSSDIKRYKLWLEQGYKSPYTGEIIPLSKLFTPAYEIEHIIPQSRFFDDSLSNKVICESEVNSLKDNQLAFEFIKNNKELTIELSHGKFVKLLHPDAYEENVKRYFAKNKPKMRKLLLEDIPDSFIERQMNDTRYISKVVKMLLSNIVREENEEEGTAKNVVVSNGGITNTLKQDWGLNDVWNTLITPRFERLNQMAGYEKYGSWENKEGKQVFQINTIEPELLKLNKKRIDHRHHAMDALIVACSSRNHINYLNNAAAAKNKQSERFDLRAKLRRIENFTDKDGKQRTAAKEFLKPWDTFTQDAKKELNHTVVSFKKNNRVINKTVNYYQKWVKQPGGSMKKMLVKQEKGDSWAIRKPLHVPMPYGLKEYSFDNLKIAENVGKKDFIIDDYIRNEVEKHFDLNNRKITDTQKFLKKNPIKDKYGNIILTTDFNIRSKKFRKRMPILKLADRSSGRGITSLDSMIKFLNKISDKTLKNDLFSHLKDNDNDINVAFSIEGIERFNSKRKTPVYKLPITESGEKRFVLGNSIGSKHKWVEAEAGTNLFFAIYIDNEGNRNYETIPLNIVIERQKQGLPSCPELNEKGHNLLFDLSPNDLVYVPSLEEQENPNSVDFNNLSEEQVKRIYKFVSCTGIEGYFVPNTNASEIIKNENGTNSKSERVQDFYDNKTILDNSGKPIQIKSVCWKLETNRLGQIKKVLR

SEQ ID NO: 24014 - protein, 1396 aa, unidentified
  REGION 1..1396: note = Cas Enzyme sequence
MSKTILGLDLGTNSIGWALVEEAENIDESSKIIKLGVRVNPLTVDEQTNFERGKPISTNADRTLKRGARRNLQRYKSRRENLIEILVKNGIITKNTPLTEIGKNTTHQTLMLRAKAAHNKVDLVDFAKVLLTINKKRGYKSSRKSKSSDEGVAIDGMTVAKILYEKNLTPGQYVYETLNGGNKFIPDFYRSDLRIEISKIWDKQTEFYPTQLTNDLFHAIEDRNKGQTYKILEVPWNLKGLKQSGKRDEQKLERYKWRQQALSEKIELEKLVIVLQEINGELNNSSGYLGAISDRSKRLYFNKITVGEHLYNQIERNPHTSLKNQVFYRQDYLDEFEQVWETQAKHYPEILTIELKEEIRDVVIFYQRKLKSQKGLISFCQFESKQEEYIDKTTGKTKFRTTGQRVAPKSSPVFQEFKIWQNLNNLTFENEKDNQIIEVRNLEDNIREEIFNELNFKGSLAPKDVLKVISKHIFINKASDWTCNFEKIEGNTTNKALLEVYQKIAEAEGYGFDWDKKSAKDINEEIEAIFGEIGVNKEILKFDSNRDDFDKQPSYQLWHLLYSAEDGGKVNEEDRLLYGNNDTKLRKTLHTKYGFKPEYATMLSNITMQPDYGNLSSRAMRKITPYLQAGHPYAKSSDNKDEAGACDLAGYNHSKSETVEDLKNKILKDKLEILPKNSLRNPVVEKILNQMVNLVNQVIDEFGKPDEVRIELARELKKTADERERMSKDIAEATKRNEEIKNLIIKEFGIPNPTKGDIVRFRLWDELSSRGHKTIFTELYIPKEKLFSKDIEIEHIIPQALLFDDSYSNKTLAYHSENLQKRNRTAYDFINQDYNQYTTEFENRVDVWYNNKSISKAKRNKLLMTYADIPDGFIERDLRNTQYIAKKAREMLLEAFKTVIPTTGSITEKLREDWGLINLMKELNLPKYKALGLTETEERFDIGSEKIKKVEVIKDWTKRNDHRHHAVDALTVAFTTHNHIQYINNLNARRNTNHKKHNIIHAIENVITERINGKPIFKEPIPNMRDVARKEIESILVSFKAKNKVTTNNINETKLAGKQRYKKTLQTTPRGQLHKETVYGRSLRPSDKPVKLNKKFNMDVANFIINKKERDAVILHLSKYGNNCEVAFASKTLKNNPILLNGETLKEVRCFEEIFTIRKPIAPDLKLDKVIDEGVRNVLEERLNEFNSNPKEAFSNLEENPIWLNKEKGISINNVTITGVNNATPLHYKKDHHGKEVVNCKGEKSHCDFVQTRNNHHVAIYKDNDGNFQESVISFYEAVERANQGLPIIDKLFNNHLGWEFLFTMKQNEMFIFPADDFEPSEIDLLNPENAGVISKNLFRVQKISTNYYTFRHHLETTVTNDLNFTFKRIQTPNSLKGIIKVRINHIGKIVHIGEF

SEQ ID NO: 24015 - protein, 1394 aa, unidentified
  REGION 1..1394: note = Cas Enzyme sequence
MKKILGLDLGTNSIGWAYVNEAEDLDEKSSIIKLGVRTISFDNFVSTDSGKESRIPENDFRSGKGISPNAGRTFKRSARRNLQRYKLRRENLIDVLKEYKFINEETILSENGNRTTFETYKLRANAVTKEISLEELSRVLLMINKKRGYKSSRKADSKDEGQIIDGMDIAKYMYEYNLTPGQYSYQLLQNGKNRIPDFYRSDLQSEFDKVWNNQKQHYAEILSDQLKEELKGKNKTQTWAICSKPFGIVGIKRTTKGSELRKENFEWRVKALSEQLNLEQLAIVLQEINAQLSNSSGYLGAIGDRSKELYFNKLTVGQYLMDLIENNPNESLKNKVFYRQDYLDEFNTIWETQSKFHKELTPELKQTIRDIIIFYQRPLKSQKGLISFCEFESKQIEKIIDGKNKTITIGHRVCPKSSPLFQEFKVWQILNNLEVSNKKTREKRFLEQEEKDTLFFELSIKDKITKPKALKLLFENYKDLDLNYKEIEGNKTQAALFKAYQSIIEQTGNGEYNFDELNSSKILDIVTNIFSGLNYNTDILNFNSNLEGADFQKQPIYKLWHLLYSYEGDNSKTGDEKLIIKISELFGFEKEYSTILANVNFQPDYGSLSTKAIRKILPYLKEGNKYSLACEYAGYRHSKNSLTKEEIESKVLKDRLEILPKNSLRNPVVEKILNQMINVVNTAIDSFGKPDEIRIELARELKKSAKERAQMTEAIGKTTAEHEKYRDILKKEFGLTNVSRNDITRYKLYLELKDNGFKTLYSDTYIPQEKLFSKEFDIEHIIPQAKLFDDSFSNKTLESRNINIEKDKSTAFDFVSIKYGETGLSYYLNRIELLFKNGVISRAKYNKLKMKEEDIPSDFINRDLSETQYIAKKAKDLLNEIVRNIVSTTGSVTDRLREDWQLIDVMQELNWNKYNELGLTEIFEDKDGRRIRRIIDWTKRNDHRHHAMDALTIAFTKPSFIQYLNNLNARSDKSGSIYGIEKNELYRNQDGNLKFKPPMPLDEFRSNAKEQLQNILISTKARNKVVTNNVNCIKKKIGTNKVIQSTPRGQLHNETIYGSIKQYETKEIKVGSIFTSDLISTVANKKYREALEKRLIENDNDAKKAFTGKNSLEKNPIYLDDLHTLQVPSKVKVVSLNTIYTVRKEVNSDLNIDKVIDVKIKKILKERLEEFGNDPKKAFSNLTENPIWLNKEKGISIKRVTISAISNAVSLHDKTNKDGILILNDHNAKIPVDFVSTSNNHHAAIFRDKNGNLQDNVISFYEAVERVNQDLPIIDKTYNQEEGWIFLYTIKQNEFFVFPNNQTGFNPNELDLLNPDNYALISPNLFRVQKFSKVTYGTSSVRDYVFRNHLETTITDKKELRDVTYIQLKSLVGLENVVKVRINHIGEIVSIGEY

SEQ ID NO: 24016 - protein, 922 aa, unidentified
  REGION 1..922: note = Cas Enzyme sequence
MHAAGCRTAGEYLATLFDDLPENWHNENEPKERIRERQRVRRELYQQEFDLIWEKQQQYHPQVLTPELKHQLRDRVIFFQRKLKSAKHLVSKCRFEPAKHVVPRSHPLFQEFRILQALSNIRITDRDRVNDLLTMEERDALAVQLGQAEKVNVSLIKEWLDYPRSARINDLGDLRGHTTWSRIRKAVGDDWFEEQSKEARLKLWHTLYFAADEGWIEEYAQRALGMNDEQAKRFAEVNLELDYGSISHKAAQKILPFMREGYDFAGACEQAGYHHSQNELDNPARELKDKLTGADIDELRNPLVQMTVNETARLVSAVIKQHGRPDMVRVELLRDLKKPKAKRETMRRDMLAKEKQRDAYRDFLKEKGIISNPYPSDIKKFELWLELEYSESDVTRLSPDMDLKAFKKFAEAVKPADKEKYRLWLECERISPYTGKAIPLSALFTEAYHVEHILPYSRSLDDSFANKTLCEDAVNTEKGNLTPLEYYEQKRTADELKAFKQRVKNFSEGKLAKFLATEVKDDFLNSQFTNSAYIGTEVRKLLRKAFKDVRVTNGQLTGLLRNKVWNLNTLLNTADGQKNRDDHRHHALDALVIACTTQSLVNRISRESQFDFRGVQRVPDVGLPWNTFRVDAAEKLNAMLVSYKGGKRLLTTKTNKYRHSMAHEGKPEKWQRTKAVRGPLHEETLYGRITLQHKGSKEETYVVRKALTSLTKPEQLENIVDPVVRKTVQDHVAKHGSLKEALKMPVYMPVKKENESKLVPIKKVRLRTNAEELVELRPGTYVEPGNNYCIAIYEDRRGKRDFRTINFLEASKRALHKQPIYPSELDGKQLLMTLQQKDLVILYDEHQDEIQWHDPNWLANHLYMVKSFDRIGAIRMVLHKRSNANPNFPKLYPAGTTYTKKVSSFRGVPVAVDALGQITKVQ

SEQ ID NO: 24017 - protein, 1380 aa, unidentified
  REGION 1..1380: note = Cas Enzyme sequence
MKKILGLDLGTNSIGWALVNEAEKEIETSSIIKLGVRVNPLTVDEQNNFQQGKSITTNADRTSKRSARRNLQRYKLRRENLIELLKENNVINDNTILAETSNFSTFETYKLRAKAANDKISLEEFARVLLMINKKRGYKSSRKLKGQDEGELVDGMDIAKELYNNDMTPGEYMLGLLSRGKKNKPEFYTSDLKQELQRIWETQKQYYPEILTDEFKNQIIGKSKTNTSKIFLAKYGIYTAENKGKDKKVEAYQWRVEALSKKVEKDVLVFVISDLNGIINNTSGYLGAISDRSKELYFNKLTVGQYLMNGFNDNPHFSVKNKVFYRQDYLDEFEKIWETQKTYHKELTNELKKEIRDIIIFYQRRLKSQKGLISYCEFENEKIAIEVEGKKKNITIGSKVCPKSSPLFQEFKIWQILNNLIVKDDKKNGRGLYQEEKEILFKELNLKNKLSKSEALKLLFENHNKLDLNYKDIEGNRTFNSLFNAFAQIVEMSGHGEYDFNKMNTDQILDIVRTVFTSLGIRVDILNFNTDLEGDEFEKQPIMKLWHLLYSFEGDNSKTGTENLLKKLNKEYGFEKDYGKVIANISFQDDYGSLSSKAIKKILPHLKEGNGFDTACLLAGYRHSKSSLTKEELDKKELKDKLDILPKNSLRNPVVEKILNQMVNVVNQVIDTYGKPTEIRIELARDLKNNAEERKNMTEAISKTTKEHEEYRDIIKKEFGFSSVSKNDLIRYKLYLELKENGFKTLYSNTYIPREKIFDKNFDIEHIIPKAKLFDDSFSNKTLELRTANIEKSEMTAYDYVKNKYSEEGLKDYLNRIDLLYKLKAISRTKYNKLKMQASEIPSDFIDRDLRDSQYIAKKARQILLEISKEVVSTSGQITDRLRKDWQLVDIMKELNWDKYDKLGMTEIVENKDSERIYRIKDWTKRNDHRHHAMDALTIAFTKHNYINYLNNLNARADKSSNAYAIEQKELYRDSHGNLKFIPPMPLNDFRVQAKQQLEDILVSIKAKNKVVTRNINTTKQKGGTNKKLQLTPRGQLHLETIYGELKQYVTKEEKIGSSFNEEKINMVAKKSYREALLRRLRENDNDTKKAFTGKNSLDKNPLFIDALQTFKVPEKVKLVEFETGYTIRKEISPDLKIDKVIDVGIRRKLEERLKKYDSNPKKAFTNLDEDPIWLNEEKGIQIKSVKIRGISNAVALRSKKNHKGELILDKEGNPQKVDFVNTGNNHHVAIYKDEKDNLQENVISFFEATARANAGIPIIDKSYNHDKGWQFLFTMKQNEYFVFPNEKTGFNPKEIDLLNPINYSLISPNLFRVQTMSKVMYGNNAVRDYKFRHHLETQLVDSKELKDITYQSIKSLSIFEHIVKVRVNHIGQIVSVGEY

SEQ ID NO: 24018 - protein, 1396 aa, unidentified
  REGION 1..1396: note = Cas Enzyme sequence
MSKTILGLDLGTNSIGWALVEEAENIDESSKIIKLGVRVNPLTVDEQTNFERGKPISTNADRTLKRGARRNLQRYKSRRENLIEILVKNGIITKNTPLTEIGKNTTHQTLMLRAKAAHNKVDLVDFAKVLLTINKKRGYKSSRKSKSSDEGVAIDGMTVAKILYEKNLTPGQYVYETLNGGNKFIPDFYRSDLRIEISKIWDKQTEFYPTQLTNDLFHAIEDRNKGQTYKILEVPWNLKGLKQSGKRDEQKLERYKWRQQALSEKIELEKLVIVLQEINGELNNSSGYLGAISDRSKRLYFNKITVGEHLYNQIERNPHTSLKNQVFYRQDYLDEFEQVWETQAKHYPEILTIELKEEIRDVVIFYQRKLKSQKGLISFCQFESKQEEYIDKTTGKTKFRTTGQRVAPKSSPVFQEFKIWQNLNNLTFENEKDNQIIEVRNLEDNIREEIFNELNFKGSLAPKNVLKVISKHIFINKASDWTCNIEKIEGNTTNKALLEVYQKIAEAEGYGFDWDKKSAKDINEEIEAIFGEIGVNKEILKFDSNRDDFDKQPSYQLWHLLYSAEDGGKVNEEDRLLYGNNDTKLRKTLHTKYGFKPEYATMLSNITMQPDYGNLSSRAMRKITPYLQAGHPYAKSSDNKDEAGACDLAGYNHSKSETVEDLKNKILKDKLEILPKNSLRNPVVEKILNQMVNLVNQVIDEFGKPDEVRIELARELKKTADERERMSKDIAEATKRNEEIKNLIIKEFGIPNPTKGDIVRFRLWDELSSRGHKTIFTELYIPKEKLFSKDIEIEHIIPQALLFDDSYSNKTLAYHSENLQKRNRTAYDFINQDYNQYTTEFENRVDVWYNNKSISKAKRNKLLMTYADIPDGFIERDLRNTQYIAKKAREMLLEAFKTVIPTTGSITEKLREDWGLINLMKELNLPKYKALGLTETEERFDIGSEKIKKVEVIKDWTKRNDHRHHAVDALTVAFTTHNHIQYINNLNARRNTNHKKHNIIHAIENVITERINGKPIFKEPIPNMRDVARKEIESILVSFKAKNKVTTNNINETKLAGKQRYKKTLQTTPRGQLHKETVYGKSLRPLDKPVKLNNKFNMDVANFIINKKERDAVILHLSKYGNNCEVAFASKTLKNNPILLNGETLKEVRCFEEIFTIRKPIAPDLKLDKVIDEGVRNVLEERLNEFNSNPKEAFSNLEENPIWLNKEKGISIKNVTITGVNNATPLHYKKDHHGKEVVNCKGEKSHCDFVQTRNNHHVAIYKDNDGNFQESVISFYEAVERANQGLPIIDKLFNNHLGWEFLFTMKQNEMFIFPADDFEPSEIDLLNPENAGVISKNLFRVQKISTNYYTFRHHLETTVTNDLNFTFKRIQTPNSLKGIIKVRINHIGKIVHIGEF

SEQ ID NO: 24019 - protein, 1449 aa, unidentified
  REGION 1..1449: note = Cas Enzyme sequence
MTKNILGLDLGITSIGFAQVIESNTPEKSEIIQIGSRIIQYDNFNKVDKSGKVSESKNPEQDFTSGKGLSPNAGRTLKRGARRNLDRFQLRRKNLVNVLEKANIITNETILTENGKHTTHETWRLRAISVTKQIEKEQLARVFLAINKKRGYKSSRKAKNEDEGQAIDGMAIAKKLYKENLTPGQLVYQLLKEEKKSIPDFYRSDLQSEFDKVWNFQKQFYPEIFNDSFYKELLGKGQRATSASFWNKYKFNTAENKAKSRDEKKLQAYKWRSDAIVKQLEKEEAAFVITEINNNLNNSSGYLGAISDRSKELYFNKETVGQNLYKQILQNPHTLLKNQVFYRQDYLDEFEAIWKEQAKHHIELTEDLKSEIRDIVIFYHRKLKSQKGLVSFCEFESQEKIIDGKKKTVGFKVAPKSSLLFQEFKIWQVLNNVLVRKKGSKKRLPKNIEQTKLFDEEKEIFDFDLETKQSLFEELNIKGNLKSSRVIEILGYKPTECEINYSELEGNRTNQVLYNAYLKILEVEGYNEDLLKLSDKDEINVNDLKTPASEIKEMVKSIFEVLGIDTLILEFDAEIDGKEFEQQASYQLWHLLYSYEGDDSPSGNEKLYELLTRKFGFKREHAQILANVTFSDDYGSLSSKAIRKIYPHIKELHYDKACVMAGYRHSASSLTKEEIAERPLKNTLELLKKNSLRNPVVEKILNQLVNVVNTIIDKNSKKDENGNVIEYFKFDEIRIELARELKKNAAERAEMTTNINAANVAHQKIFKILQSEFGIKNPSRNDIIRFRLYEELKNNGFKDLYTNTYIPRNIIFSKQIDIEHIIPQSKMFDDSFSNKTITYRKDNLDKGNKTAFDYIESKFGEIELDLYTKRIETLYELGKKNKDEGISKAKYQKLLKKEIEIGDGFIDRDLRDSQYIAKKAKNMLLEISRTVVSTSGSVTNRLREDWGLINIMQELNFEKFKSLGLTEKVEKKDGTFKERIIDWSKRNDHRHHAMDALTVAFTKHNHIQYLNYLNARKNENHKLHNIIVGIEALETKILIDDEGNKKRVFNLPLPRFRQHAKEHLENVLVSHKAKNKVVTKNKNKIKTSNGNKVKIELTPRGQLHKETVYGKYKYDVNKEEKVSSKFDANTIKKVSNPLYRKLLSERLEKNGNDPKKAFGGKNVLSKNPIYINQDKTKTLPETVKLTWLEEDYSVRKEITPENFKDAKNIEKVFDAKVKKILLDRLKQFKNDSKKAFSDLDKNPIWLNQEKGIAIKRVTISGVKNAEFLNYKKDHQGNFILDNKEEKIPVDFVSTGNNHHVAIYRDEKGKLQERVVSLFEAVQMVNAKEPIIDKQFNQGLGWEFLFTMKQNECFVFPNEKTGFNPSEMDLLDPKNKKLISPNLFRVQKISNKNYVFNNHLETKAIDGNILKNKKDLSGIMYYFIQTPNNLENIIKVRINHLGDIVGVGEY

SEQ ID NO: 24020 - protein, 1179 aa, unidentified
  REGION 1..1179: note = Cas Enzyme sequence
LNHHYSYNYKDKTNVAGCPISARLKNLFGKEWRSYKFYSTQSRTDKKGNNHIITYSIDDIWHVLFSFEDEENIRDFAENKICLGDKSKALLNLWLAIPQGYSMLSLKAIKNINRFLQKGHIYTDATLLAKLPEILGNDLWLKNEAFFLTHIGELTAKNRKQRKILNISNNLISQYKAKSLEHNEQFAYKSTNYSLDESDLLDIENHCIDSYGDKTWADKMTEEARLQIKSEVSKYYQAFFSSSKRDYFKIPKLGDTLKEFLTDNFEFLQCKNKERKKDEPCSCSACKKVNLLYHPSQIAIYAPAKEQSVEYNNLTLSLRLLQSPKTGAFKNPMAMRTLHELRKLINYLLLEGKINEETRIVVETARDLNDANMRWAIDAYQRQRESENKEYELAIRELLNDSDFDGNANPSNNEDIDRMRLLVDQYDVPEYGELVTDEETIVKSKKEKKKVEKVESFNRSPEFLQKIMQEKDLIKKYRLWKEQEFRCIYTGKTIKITDLFADSIIDFEHTIPRSISFDNSLENQTVCFADFNRNVKKKKIPYQLGNHHEIILRLSNWKSKVERLQDNVEFWKLKSKKATDKDAKDYAIRQKHLWQMELNYWKGKYDRFTMKEVTSGFKNSQLVDTQLISRYALHYLKSVFSSVDVQKGSVTAAFRKIIGIQDEYEKKNRDQHSHHAIDASVLTLIPKAATRDRMLELFYKKQENKDLIKGNTNSTEVAYLKAENGKIESDLEFEIRKCKIGSANKIVETIEGNIIVNAITNDKALSPARKVLRKRGKPVPIRDTNKQPVYITDANGNIKYRTHKDGNLLFKRDEKGQFIFDENGNKTPIPIVEPIIVTGDCIRGQLHEESFFGAIKKVKRDENNKPILLDGKFVFEDGLYYVIRKDLKYKKNANDTGFQTIDDIKKDIVDPNVYEAIRKQVESAGNSLKDAIDKGIYMLGKDGVPKKFDKHGSHLSKIRHLRVYVRSTEPLTIKKQTYISNKPLVHLQNREHKKYYYANNATSPYYVLYQGKIKDKIERKYEIINLFDAARLRINNKLEVQDYVFYDKKEMVKLDLHAILTVGQKVLFYKKEPIELQEIDKREQGKRLYIITGFEKDGRIRFTHHSEARDDKKLMEAFPENGLDKEDKKYGKSGKNGFSSLNWESPWPKLKLSIGNLNMLIENKDFEIKPDGKIILNRL

SEQ ID NO: 24021 - protein, 1372 aa, unidentified
  REGION 1..1372: note = Cas Enzyme sequence
MKKILGLDLGTASIGWAVIERAEKTDESTRIVACGSRVVPLSSDEKDNFEKGKSITTNADRRLKRSMRRNLQRRNSRRDALIALLRSEGWIHADDVLSEEGKGTTHETLRLRAKAAQEKISLLQLARVLLSINGKRGYKSSRKVDTGEEGQLIDGMSIAKELQLLQITPSEYRQRHILDGKPKRFDFYRSDLENEYEKIWTFQQQFYPDILTEELHKQLQRQGKQGTSSIFLAKHGIYTADNKGKDKDKTAVTWRVAALTEKLEPDVLAYVISDIRKDIQNSSGYLGQISDRSKELFFNNETVGQYLFRHLQKDPLYSTRNKVFYRQDHIDEFNRIWTVQAGYYPELSDSLRRKIADQILFYQRPLKSQKGLVSFCEFESHPIEVLVDGKKQVKTTGSRCAPKASLLFQEFKIWQILNNLRIKDRVNDGERILSLDEKNLLSQELSIKRSMRQTEVLKHLGLAPRRYELNYSEIEGNTTLSALFSAYLSIVDLSGHGEHDINKLNYNQVLSVVQTVLPVLGCTNDIFHFQPDLPKQEYEQQPLFKLWHLLYSYEGDNSHSGKESLFRRISDLTGLDREYAKVLGAITFKDDYASLSHKAISKILPYLKEGNTYDKACTRAGYNHSHFETAEERGQKQLLDHLEQLPKGCLRNPVVEKILNQMVNVVNASTQAYGKPDEIHIELARELKQSAREREKATSDIEGNKKRNLEIVKILQEDFHITNVRKTDILRYRLYEELKENGFKTLYSDKYVPRDKLFSKEIDIEHIIPQARLFDDSFSNKTIEYKDINIEKGRRTAADFVKEKYGEEGYTRFRLRVDDLRNRGALSDKKRKNLLMTESDIPSGFVDRDIRNSQYISKKAQELLKDYVRIVLPTSGSVTARLREEWQLVDVMKELNFAKYEKAGKTAITEDIDGRIIRKIQDWTKRNDHRHHAMDAITIALTKPEHIQILNNLNARSDKDSVFFQMLQKETVVIGNKRIFTPPMPLDILRGEVKRSLNDTLISIKAKNKVVTNNINKTKTKNGYQRTTELTPRGPLHKEQVYGQRFRYETFEVTVNAKMTKEVIANVASKRLREALFIRLNEFDGDPKKAFTGKNALDKNPIYLDSLHTEKVPQKVKCTRLAPYYCIRKDIGPDLSIDKIIDTKVRSRIEERISEYGGNAKAALSNLDTNPIWLNDAKTIPIKRVTIGENFDLCAIHNKRDKNGQIILDADGNTIPSDFVNLRNNHHVALYLDAEGKVQESIVPFFEALNRVNQGLPVVDRMFHSDLGWEFLYSMKVNEMFVFPDEANGFYPQEIDLLNPANASLISPHLYRVQKLSSKDYYFRHHQETSIEDDKALRDITWKRVQSIQAMKDVVKVRIDHLGRIVTIGEYD

SEQ ID NO: 24022 - protein, 1397 aa, unidentified
  REGION 1..1397: note = Cas Enzyme sequence
MKKILGLDLGTNSIGWAVVNEAEKEGEKSSIVKLGVRTISFDNFVNTVSKKACMDAVADFNGGKSISCNAGRTQSRSMRRNLQRYKLRRNYLRKLLKEHGFVDDATILAEKGNGTTFETYRLRAKAATEEISLTEFARVLLMINKKRGYKSNRKAKSSDEGSLIDGMAIAEKLYNENITPGQFVLSLFNQGKRYEPEFYPSDLQTEFDKIWDFQRTFYPEIMTDSLKQNLEGKNKSATWAICKTPFSIVGIKRSTKGFDQKKEDYEWRVKALSEKIGLEELAIVLQNINGQKSGTSSYLGNIGDRSKELRINHLTVGQYQMNELAKNPNYSLKNQVFYRQDYLDEFETIWETQAKYHCELTPELKHEIRDITIFYQRPLKSQKNLISICELEGRKVNRTIEGQTKTVLSGPKVIPASSPIFQEFRIWQVLNNLMLTSKETGEYCALKQDEKEKLFVELNVKEQLSKSDALKILFNKEYREYDLNFDKIEGNRTQSKLFDAYRRIIEISGCGEFNFQKMSAKEIFKTVHSSFDKLNIKTDFLSFDSSLTNQEFENQPLFRLWHLLYSFQDDNKSSTGIGSLITKIEKLCNMERDYAAILANVTFEDAYGSLSAKAIKKILPFMKQGQMYSDACASAGYKHSKRSLTREELANKVYKDHLDALPMNSLRNPVVEKILNQMVNVVNSIIDTYGKPDEIRIELARELKKSAKEREEMTNAIKKSTADYEDFRKILINEFGMEHPSKNDLLRYRLYKELESNGFKTLYSDTYIPQEKLFSKEFDIEHIIPQAKRFDDSFANKTLEKRQINIEKSNSTAYDFVLAKYGENGAEQYKSRIDKMYNEGMISKTKYKNLLMHEADIPSGFIERDLRDSQYIAKKAREMLEDVVKFVVPTTGSITDRLREDWQLVDVMQELNWEKYNKQGLTEIFKDKDGRTIHKIIDWTKRNDHRHHAMDALTIAFTKRSYIQYLNNLNARVPKSEQEYIDLTDYDLSNINPVDVKKIEASIEQKELYRNEKGKLCFIPPIPLDEFRIQAKEQLESTLISIKARNKVVTRNTNISKGKNGRLNQQQTLTPRGQLHNESIYGSYQAENVKSEKIDAKFTAEKIATVCNAKYRNALLERLNAFNGDAKKAFTGKNALVKSPIYLDEMHTIKVPEILTTKNYETTYTIRKAISSQNFKDVKSIEKVIDGKIKKILLDRLAEYGNDSKKAFDNLIDNPIWLNKEKGISIKNVTIRAINNAVALRKGHDFVNTGNNHHVAIFQDADGDLQEHIVSFYEATQRATKGLPIIDKEYNKELGWQFLFTMKQNEFFVFPNQETDFDPQKIDLLDSKNNALISPNLFRVQKFTTKDYFFRHHQETMLNDNKKLLGITWKRGGLSLLNGVVKVRVNHIGQIVSVGEY

SEQ ID NO: 24023 - protein, 1570 aa, unidentified
  REGION 1..1570: note = Cas Enzyme sequence
MEKRILGLDLGTNSIGWALIKHSFDEKKGEILGMGSRIIPMDAAKVGEFERGNPVSATADRTKFRSIRRLYERDVLRRERLHRVLHILGFLPTHYAENIDFENRPGQFMKNKEPKLPYQEISNKKYDFIFKDSFHEMVDDFRMTQPQLFYLKANGSESKIPYDWTIYYLRKKALSEKIKKEELAWILLNFNQKRGYYQLRGEDEELEDNKVITFEILKVDKVIDSGEKIKASGAILYDIYFENGWKYDKRVTKTEDWAGKTKEFIVTTSVLASGEISHSYKAVNSEEDWIAIKQKTEQDIESANKTVGEYIYDTLLINPNQKIRGRLIRTIERKFYKKELKLILEKQKEFHPELRDRDLYKSSIEELYTNNEAHRNNIANRDFTYLFLDDIIFYQRPLKSKKSLVSNCPFEFRYFKKEDGTVEKTGVKCIAKSHPLYQEFRLLQWLKNLRIFSKEDINEVDITNELLPTTADREKLFEWLNGRTEIDQKSFLKYAPFNLEERIKMRLGERQFQLFKKDKEQGLDTYYRWNYVEDKKYPLNETRGEILKRFKKIGIDVNVLDKDTETHLWHILYSVEDKAEIESALNSFAKRHNLPEGFVNEFKKYPRLDKEYGSYSAKAMKKVLPLMRFGKWWDGEVIDECTRQKIDKILTGEYDEKIKNRVREKAVDLKEEQDFQNLPLWLVSYIVYNRHSESSDVKYWKTAQDIELVKQHSLRNPIVEQIINETLQTVREIWEYYGEGKEKFFDEIHVELGRSLKEPAEKRKKVSERITENENTNIRIKSLLVELFNDDEIENVRPYSPMQQEILKIYEEGVYQNPDVTYSMVSESEINKIRKKNQPSSSDIKKYKLWLEQGYRSPYTGVIIPLSKLFTPAYEIEHIIPKAKFFDDSLSNKIICESEVNSLKDNQLAYSFIKNNRELKIELSHGRFVTLLSPEAYEANVKRYFGNNRSKLRKLLLEEIPEDFTERQLNDTRYISKVVKTLLSNIVREEDEEEAIAKNVVASTGGVTALLKQDWGLNDVWNSLITPRFERLNTMAGCEKYGSWENKNGKVVFQINTIEPDLLKLNKKRIDHRHHALDALVVACSSRNHINYINNDNANGKDKSKPRRFDLRNQLRIIEEEEVNTVVNGELQRKRIKVAKEFLKPWESFTQDAKEELNRIVVTFKKNNRVINKTVNYYQKWVKQPDGTMKKAYVEQTKGDHWAIRKPLHKETVSALVNLQMKKTVNLSVALDNSKDIVNKLLRKKIDELISEGFEKKQIQKYFKGLDNRWAGEDISKVDVYNFTNDKESTMIAASRVKLDESFSEKNIESITDTGIRKILLAHLEKYKGLLDENRSPVAPETLAFSPTGIEELNKNILNLNGGKKHAPIYKVRKFEKFGEKFNVGVSGNKKQKFVEAAKGTNLFFAVYIDEDGKRNYETTPLNEVVEHQKWRATLTRQEKDITPIIPVNREKGKFLFSLSPNDLVYIPSTEELENPGEVDFNNLDKNQVKRIYKFVSCTGGEGHFVPSTNASEIIKNENGTNSKSERQQDFSDDNTIIDKNNQPIQIKSVCWKLETDRLGNIIKIFEAEN

SEQ ID NO: 24024 - protein, 1391 aa, unidentified
  REGION 1..1391: note = Cas Enzyme sequence
MTKVNKDYIVGLDIGTDSCGWVATDKKNNILKLQGKTAIGSRLFEEGHSAADRRTFRGTRRRLNRRKWRLKFLEEIFDPYMTKVDPYFFARLRESGLSPKDSTKNTQAIIFPTPKDDSDFYYKYHTIYHLRQALMSEDKKFDLREIYLAIHHIVKYRGNFLQNTPVKSFDASKINVKKTIKALNQLYAGSSNENQIELNIENTSKIEDIIRSKTTFKMDKAKQISKLLAMSSENKDINKQNRNIAKQITNAILGYKTQFETILSKKIDKNDKATWEFKLSDADVDDKLAILLPDLNQSEQGIIDEIKQLFSAVTLSDIVDEGKTLSESMIRKYNDHKKDLKLLKDVVRSQKDKDKAKRLSLAYDLYVNNQHGKLLEAKKAFKVMDKDKFYKIVKNNVDDSESAKTILKEIELDSFMPKQRTNQNGVIPYQLHQIELDKIIKNQSKYYPFLAEKNPVIDHQKQAPYKLDELVRFRVPYYVGPMITATDQEKTSGKNFAWMIRKEQGQITPWNFEQKVDRMASANKFIKRMTTKDTYLLGEDVLPANSLLYQKFTVLNELNNIRINNHRISVDVKQDVYKNLFKKYKTISSNKLSNYLKNNYNLKFVKITGLSDKSNNSKFNSSLATYYQLKHLNILGDKIDDPNYQKDLEHIIEWSTVFEDKSIYAAKLKTIDWLNVEQIKALSNLRYQGWGRLSHKLLTGLHDKNGQNIMEKLWDSQKNFMQIVKEPDFKAAIEKENQSVVKATDTEDILADAYTSPANKKAIRQVIRVADDIVKAASGKAPSQFAIEFARESEKNPKLSQIRGSKLRKSYEKVFENSANKLVDVSLKEELDNSIKSRKLVRDKYFLYFMQGGRDAYTGERINIDEVDTKYQIDHILPQSFIKDDSFNNRVLTLAKINNEKSDRLPFNYSNRPADKGRLGMTMHQMWHEWLESGLISKYKYRNLILDPNQVSKYQKSGFINRQLVETSQIIKLVATILQAKYPDSEIIVVKAGYNHALRERLNLCKSREVNDYHHAIDAYLTTICGNFLYQVYPDLRPFFVYGQFKKFSSNPDLEKQALKKHKKFDFIWPLLKKKDAPEEIHQFKMGPVVFHKHEDIFNKLRRAYTFKYMLVSREVTTRDQEMFKMTLYPRADHDTKKSRKLIPKAKNMPTNIYGGYTSNSDAYMALVKIKKGQIFIYKVIGVPMRALSKLKIAKKQGKYDQVLKDVLTPVIMLNKNGKTQRGIEGFRILKGKIPYKQVVLDGEKKFMLGSSTYVYNAKQLTLSNETMRIVTNNFTIKDDRSKLLNQAYDEILEKVDKYLPLYDINKFREKLHIGRYKFVNLSIKEKQEMITQILNGLHDNPVVGNLKNIGFATPFGKMQESTGVVLSSEAKLIYQSPTGLFKKRVKISDL

SEQ ID NO: 24025 - protein, 1523 aa, unidentified
  REGION 1..1523: note = Cas Enzyme sequence
MENNYKKILGLDIGTNSIGWAVIERDFENETGKILGMGSRIIPTDSELLSKYETGQAASKNAGRRQARGARRLKQRYKLRRQRLINSLKILGWLPDRFEPGNQMQISQQTLQEMKIAFGVEEISDDWVVYYLRHKALTNPVSKEELAKILYHMNQRRGFKSNRKAGNEIPQSEEGEESEGGKKKREKKVEIVTIQSVSDTGEKQKGNTVFEITLFDGRKGTIARKLKPNWENQELELEITRIPPTQKNAERFEFRPLSNSDADKWAKQKVAREEAIRKSECLYPGNYYFHELKKNPHYIIKDVSIDRSFYISELTAILQKQLELNSDLNDKAAIHKIAETFYPKNLEKQKELKNNDLKHLFINDIIYFQRPLKSKKSSIADCRFAKKNFIDPSTSKKIAYKAAPVSSPVFQEFRIRQTVNNIKVLQRQYRDENGKLRIEEDVTAKYINIQALEKLYELFDNKEKITQKQILKVIGLDEKEFLINLFRLNEEKELPGNETKSLIRKLFKKASYENEGELLLSDQNKFYLLWHILYSLDEEKHIAKALKNKFGLTDDVASVISKAPAFKQQYGSLSHQAMSRLLPLMKSGKHWNWNNIDKDTKQRLQKIFTGEYDTAISNQVRDLFEKYQIKSENQCLGLSVPMAAYAVYGAHSELSSVTFDSPVQLIPKEPLKLRNPIVEQVVNEALRVVQDIWKTYGRPYEIHIELARDLKKNAKEREEMTKTITENENENKRIAAILRELKIGNPNSISDIERLKLWEKQAESKAREEFKNIKFKRPSEPTKDEIEKYKLWAQQKFLSPYSGDPIPLSKLFTRAYDIDHIIPRSRFFDDSFENKVIVESHLNKEKENMTSYEYIKSGSPKGNGLLSPDKYEAHINQFFFGKKKRLLLSEDVPKTFSNRHLVDSRYISRKLNELLAPVSENSNDPVIPTSGAVTSELKSAWGLGEKMKELIKWRFERLEDKTHENYVWYDDETDQEGKSTGRKILRLNGYEKRLDHRHHAMDALIVACTTRAHIKYLNDLNASQYRKQPTEEEIKQALPKLLEAGKDNYLQSRKFKKPWKGFVAETVSALEGIIISFKKNIRLFGRKANKNLRYVQQPDGIFVKKYLPVINETGQRKLSPYVRASLHKATIAGKISLREYNSVSISEAFNHPELIANKKEKKHLQQILKQANGDFKKAAKLYKENPLKDSNGIALKKVMVIETTPYFVNRVDVTSGFDEKRIEKIPDKVLQKELREHIMHVGQLNQNRSKDEQIDPFGNEGIEILNKNRKFPITKISTKEESSAKFQIRPGAYTEADKGTNLFFVIYQNTQDTTDRQFESIPLRDVIEAKKEGSGFVEDRPGYRWFTISPNDLVYMPDEGENLNTIDWNKKLIAGKIYKMVSCTGREVLFIPQTVSKVIVDKVEFESLNKTGRALDGRMIKQHCIKVQVDRLGNIQPAKKELYNKPSEPANVLSEPEAPYQTGSLKFFSGFDEMENDQLKYFASLQPKDLLQNLKQMVLAAFGFRAETPVSSLPRTIYFNDEP

SEQ ID NO: 24026 - protein, 1022 aa, unidentified
  REGION 1..1022: note = Cas Enzyme sequence
VHIWGFDIGTTSVGFAVIHHDAAKETGRIERLGVRIFPEGVTEDKKEPRNAQRRQKRLMRRQLRRRRLRRRLLNEALANAGLLPKYGTGEWRGLMNSDPYALRAKALGEPLSQFEIGRALYHLSKRRHFLGRAVPEEPNRKPDKDEEKAREAAKALEAKLGGKTLGAWLNDQDKKRGHHATRATVTDEFERIIAAQSRHHQILADGGFVARIEHLIFFQRPTFWRLATLGICPLMPAEPLAARGDWNTQQHELLDQVNKLRIAGGNARPLTQAERAAILKAIDGQRSMKWGGVRKALKPIWKQAGEPLDQKFNLEVGGEKELKGNVVEAALGKIFGSSWQDHPARDVLRRTIFARLYDCDYVKIGNARVEIRRPKDADARRKELAQRLRQELGLTSEQADALATLELPGSWRRLSAKAIEIMRPKLEEGVGVGQLLMSPEYEEWRRQNFPDRAAPTGEIVERLPAHVKSMPEVRNPTVTRCLNELRKVVNNLLARYGRPDLIRIELAREVRISASKRSKINEDNRNREKLRDKAAKDLATKGIATPSDPDIEKWMLWKETNERCPYTGDHISFDDLFRNGKFDFEHIWPRKRSLDNRMANKTLCRKDINIKKGNRTPWEMFGSDEENWQGIVKRLPDLGLAESKIKRFTHKNVAQALDDEWAERQLRDTSYAAREARDFVARLWPDDGRPKPVETINGRVTADLRKRWGLNYLLGDDGAKNRADHRHHAVDALVAACTTRGFVKRLSDYYASESRVRDPYLPKPWPTIREDAETALHEIVVSYRVDRKLSGSLHEEQPLGLTSLKTEKDGSSWYTRRKPLHGLSDSEVEDIRDSTIRDAVLQHAPSEKERKKLEHAPLLLPDRKNPNGRSVKKVRLLYKCKPNAVLPLRPQPKSFAELGQVLHHIAFYRNSSGHLSFATRTRLEAYNLQRATGSPVAKALDDGSKLILSLCKQDTLERTSADGRKEYLVVRKCNQAGRVFYKPAISAIEPKPEVSFGPTAFSDGSIRKVAVDPIGRVRPAND

SEQ ID NO: 24027 - protein, 1445 aa, unidentified
  REGION 1..1445: note = Cas Enzyme sequence
MKKILGLDLGTNSIGWALIEKDNKKILGIGSRIIPMGTDKSDYEKGVGITKNADRRIARGIRKMNKRFKLRRNKLLFILNQLGCLPDQFQFKNGIPDPNRLQAMELLPIAKGTLQLDSLQQAELNVKALNDKVQLKELGKILYRFNQLRGYSGGTNEDEDKKAKKEEEEDNENNAKKNYEIIVEKVEITDVEKSADRFKTKNEELNYYNVSVIYVDEKIEGRTRLQNLSVGEQELEIRIKRNKKGEESYEFSLPRKTNWRKQMEATEDVIKTENIFVSELLLRDLRQKKWDRIRNRVILRNRYKQEFDAIWDKQYEKNAEFKKLADDKKLLEKIIQYIFPEREQNKPETEESKKSQKEKLREDARGGGLKYLIKEQVIYYQRPLKPQTDLISKCRFEKEEQVLAISHPLFQEFRCWDQINRLYLTSKFKFFDERKKKYQYRYLDRFLTNEQKQEIYDKLQKQKQVGFNDVAKIVELKNDKTEYLNGLNVKAKLKGVDTTLSIKKILDEHFDELKQKDEKIVTNLWDILYSRTGNEYDENSEKVVSLIKVLSSHLNKESATRLSLKLAQNSKFPRRYSNLSGKAINNILPLMRLNPTDLPEKILMNIANIQHMIETGEILDDNFLEDYVISFVKNNPNLSQTGGLMYAFAASLVYGKHTQQDVKKEITDYHQIKYNPNRNLRNPVVEQLSNEAMQVIKAVWKKYKLDPNELEIRVELARDLKNSASEREKIYKGQLKNEQINASIKKRLQELNKEITATNIEIYKLWSNQNKDAYPKLPKEPTSEDILKLRLWEEQSCLSPYTLKPIPLSKLFSPERLYDIDHIIPKSRLFDDASSNKVVCETVINEEKGNRTAWEYITQQNSRLGICSVEDYVGVIGKIFHGRKKKNLFLEKIPTDFVERQKKDAQYIAIAVKSELAKIVGLQNVKTSTGEITAFLRGIWGLKKLLMRLTEARFKQMELWDWNKETGQPNSRWINKYFDKEKQKHIYEIKNWSKRYDHRHHAIDALVVALTEQRHIQRLNDLNKELQNWLEDNKEKVNLVVNEDETVLEAFFNLDEKRREEIQKKIEGFRKIETPFEDLIQQTELLLETMVVSHKPKDKLTIKIDEKTGKKQLKIRAALHEATFYGKWKGMDTKTLDISELSAKDIAKIIDQDVLAKEIGNHRKKYTSMKEAFTGEGLKAFNENRFQRKKPDKLKPPVYKVKVRYNAKENKESGLQRLYEHNEKLSVITGDNYMFLIMEKEGRKGKERVFDIASLYDSADIAKRAIKENKINFKAVVAEDFRIKHKDKPTRVLFTLQQNDLVYLPENEDDPVAKYNNNELHEWLSIDSNKKRFSKRIYKVVKFTGADCFFVPHNYATPISVAKELSDKEKEALREKYFDKKIPKHELNYLEFGSFGTSAKTEVNEDFVKELILKKDYKGEKPKKIQDSCIKLQVDWLGNVLKSSL

SEQ ID NO: 24028 - protein, 1067 aa, unidentified
  REGION 1..1067: note = Cas Enzyme sequence
MVAKHKDYVLGLQINASSIGWAAVQLSDKDDKNPVALMHPGVHLFDPGVEGSLLEIKRGKDISRAVAYRQVKQSQRIRERRLERETELFALLQMQGLLPASTNGSPKQRLDTLNNLERELEKALADRHPHNKLPYILRADALDRRLKLFELGRIFYHLVQRRGYQSNRRKPEKEGQEGAVKQGISELAQEMQKLKARTLGEYFSKIDPQKVKIRRRWTSRQMYLDEFEQIWTKQHKYYPDLLTPQLKSQIHRLLFFQRPLASAKHLVGFCEFEPKQRRAPMCSMEAQRFRMRQRINDLRICPIGQAEGSPLTKEEKEALYRLLEVNPQLTYTAVKKHFGFPKSSEFNFQRAGEKQILGNRTYAHHYKVFGDAWLKMTPEQQAETINIWNAAETEKQLVTAGMRHYLLTEEQGKLWASELPESGYCSLSKKAIARLMPHLNEGIGYTTAVEREYGEGVHFKPIHEEIPPVREVFRALANPAVERSLTQTRKIVNALVRRYGKPYRIHIELGNELRRSRKERQNIHIGNKQREASRDKLRERVSEATGIAKQNVSGSDIEKVQLWDECDGFCPYTGHKIPFDALFRGDDWMMTNILPFNRHPDNSFSNKTLIYAPELASVKRNFTPYEAYGKNEDLFDDILRRVDLFKGDLAIEKLHRFEVRSREDLEIYTQRAMNDNRFATKWAMELVGTLYGGRDVLLPQGVTRRAVCGRPSALTALVRRKWALSDLYRELPDDWRAQTLDPIAIACLDDEIFHRMTRYSKDSNAIESPWPDFIDSIRSQVDSIVPSIRVEKKLNGALHQETHYSKPVIDEQGRSWVTVRKPVTAMSKRDIEAIVSKPVREAVLRHFLALEEDLSTCAAANNWPTIQVGKRPAVPIRRARIRKALTVTKVGKEGFERYVANDRNHHMEVFEIDDANGPRYVSRTVSLLEAKTRCNRKQPVIDERLTSLNGVSGRLPKGAKYKHLFVCALMIGDLILLHRDCEHENDVCIPGIYRIRGIAANGQVTVMPLNETRSAVELDKAHEGWSPKVDALRKMGMAPVKVDLLGELHPNGGKIDLFQPRKVATHQ

SEQ ID NO: 24029 - protein, 1384 aa, unidentified
  REGION 1..1384: note = Cas Enzyme sequence
MKKVLGLDLGTTSIGWALVNEAETANEQSSIIKLGVRISQLDNFEKVDKTGKVSESKNPTEDFASGKGLSPNAGRTQRRGARRNLQRYKLRRKNLIAVLTNHGIINSQSVLTEDGEHTTFETLGLRAKAAKEKIQKDQLARVLISINKKRGYKSSRKAQNEDEGQAIDGMAVAIKLYEERITPGCYCYQLLQQGRKIMPDFYRSDLINEFERVWDFQKQYYPEILDDELHKAIQGQGMQSTRKRLLAIKGIFTAENKGKKEEKKLNAYLWRSKAISERLEIDQLAFVLAEINNNLNSSSGYLGAISDRSKNLYLNKQTVGEYLYEQITKNRHTRLKGKAFYRQDYFDEFEQIWETQKLFHTELTDQLKNELRDIIIFYQRRLKSQKWLISHCEFESKPWIEIVDGKKKIKVTGSRVCPKSSPIFQEFKIWQNLSNLEFTNKKTKQVEKFVDNDLETKQLLFNELNIKGNLKKNDVLRLFELNPNEWNMNYLQLQGNTTNKILYEAFQKIIFHEGHEIDFSKSTADEIKESIRAIFGMLGISTEILFFNAEEDGAEFEKQKSFQLWHLLYSYEGDNSKSGNEAIYNVLNKKFGFKKEHAQYLINLNFQDDYGSLSTKAIRKIFPFIKECTYSKACEFAGYNHSHSVTKEENEKRILKDRIELIPKNSLRNPVVEKILNQMVNVVNAIIDDPTLGKPDEIRIELARELKKSAKEREKMTESINNSKKLHDEYHKILMEDFHILNPTRNDIIRYKLYLELKSNGFKTLYSNQYIPQEKLFSKEIDIEHIIPKTRLFDDSFSNKTLEFRNINIDKSNETAVDFIKDSFGLDQLNLYKTRIEKLYNEGAISKAKYKKLLMEGSDIGEGFIERDLRESQYIAKKAKNMLYEICRNVISTTGSITDTLREDWGLINTLQELNIDKYRSLGLTKFEERKEGQVVEKIIDWTKRNDHRHHAMDALTVAFTKHSHIQYLNNLNARRDIEHKKHAIIIAIENKEVMRDENNKRKFKPPIPNFRSVAKKELEKILISHKSKNKVVTQNKYKIQGHSKAKVSLTPRGQLHKETIYGKSKYYESNMVKVGTGFDLKMINQVANPSFREAILRRFIENDNDAVKAFGGKNSPAKNPIFTSDNVQLPEKVKVVWMADRYTIQKDVTPDLKLDKVVDKGIQRILQRRLEEYGNNPKEAFVNLDENPIWLNKEKGIAIKRVTISGVSNVEALHTKKDHFGNEILDENGKPLPVDFVSTGNNHHVAIYKDEIGKLQEDVVSFYEAVARVNEGLPIIKKQHEKGWEFQFTMKQNEIFVFPADNFDPSEIDLLNPENNSLISPHLFRVQKFTIKDYFFRHHLETTVENNNALKDITWKREGLSGIEGIVKVRLNHLGQIVCVGEC

SEQ ID NO: 24030 - protein, 1506 aa, unidentified
  REGION 1..1506: note = Cas Enzyme sequence
MKKILGLDLGTNSIGWALINSDSENNNNKILGMGSRIIPMSQDILSDFTQGNSISQTAERTQYRSTRRLRERHLLRRERLHRVLHLMGFLPKHYDEMIDFENHPGKFLPETEPKIAWSKNDESKYEFIFKKSFEEMMADFKANQPELLTDGKKVPYDWTIYYLRKKALTQKIEKEELAWILLNFNQKRGYYQLRGEEEDEENPNKSIEYHALKVTHVEADEAEKNKSDIWYTIYLENGWIYRRSSKIPLFDWIGVTKEFIVTTELNDDGTVKIDKEGKEKRSFRIPSEDDWTLLKKKTETDIDKSKKTVGTYIYDTLLKKPDQKIRGKLIRTIERKYYKKELKKILTKQKEFHPELKDRNLYRSCVVELYPNNKAQQNNIRNKDFTYLFIEDIIFYQRPLKSKKSLISNCKFEYRTYKDKEGNIRKAPLKCVPKSHPLYQEFRLWKFVQDLRIYEREKKINGKLYIDYDVTNEFIKTEEDLVNLFDWLNKRSGIKQNTLLSSYFKVKKTNKTDKQLPYRWNYVEDKEYPCNETRFSITNRLEKINDLPNNFLTNRKEFELWHLLYSVIDKNELEKALKKFAAKNNLPINEFVDAFVKFPPFERDYGSYSEKALKKLLPLMRMGKYWNYEAIDLNTRQRIEKLLTGEVDETIHDKVREKTSHLTDEKQFKGLPEWLAAYVVYGRHSEMSEYTKWNTYHDLNNYLQDFKQHSLRNPIVEQVIMETLRVVRDCWEKYGNIDEIHVELGREIKNPAEKRKKITKTITQNENTNLRIKALLIELANDGVENARPYSPTQEEILKIYEEGVLNSTIDIPNDIEKIVRKATPTKQELNRYKLWLEQKYRSPYTGEIIPLAKLFTPAYEIEHIIPQSLYFDDSLSNKVICESEVNKLKGNQLAYEFIKTHHGEKVELNFGKTVEIMSKEAYEKFVNENYRNNFFKRKKLLMDDIPDEFIERQINDTRYITKVVKSLLSNIVREEDEQEPTSKNVIVTTGQITNTLKRDWGLNDIWNEIIYPRFERLNRLTNSTLFGQWVNENGKRFFRTQVPLDLQKGFSKKRIDHRHHAMDALVIACTTRNHVNYLNNESAKSSNRETRYDLRNKLCKKVKTDDKGNYIWQFIKPWETFTQDAKIELENIVVSFKQNLRVINKTTNYYQRYVNGKKVIDKQTKGDHWAIRKSLHKDTVAGQVNLRFKKKVSLSVAIDQPENIVDKQLKREIKNLQKEKFDKKQILKYFGNLNYRWQGKEIKQPEIYYFSNDKVEMTASRVNLDTSFGTKKIESITDTGIQKILKNHLSKFDENVNGTIIEHPELAFSPEGIEEMNKNIRELNDGKPHKPIIKIRTYETKGNKFNVGTKGNKKLKFVKADKGTNLFFAVYIDDDGKRNFETIPLNIIIERLKQGYEAVPEKNEKGHRLLFHLSPNDLVYLPTEEDIINGNVSIPLDNNRIYKMVSCTGNVADFIPFYVANPIVKTTELGSNNKAQRAWTGEMIKEICIPLEVDRLGNIVKIKTT

SEQ ID NO: 24031 - protein, 1430 aa, unidentified
  REGION 1..1430: note = Cas Enzyme sequence
MTKLGIDLGSSSLGWTLRDGNEFKKKGVITFNSGMVKGQGGYTSPTRDRREARSKRRLIQARKYRKWELLKVLIGEYVPLSIIELEKWSKYQKGQTRKFPENENFKKWLSCDFTYLKNGNKYQNPYDLRVKSLDFNLTKHELGRVLYHLVQRRGYKDIGETDKETQNQIDRRDESGLKDALERNRTLGEALKKGFLEKGKRARNEYPFRNEYEEELFEILKSQNFNISKDENGTLTDDFVNNVRKSIIWQRPLRSQKGTIGKCTLEPNVLRSPISHPIFEIYRAWSFINTIKYFDENGVKKSLDKGVRKKLFDNLFLKKDRFKFEDVKKFLDKDFGKKQKYNYPIDSRTGKYETSVSGMPVCKEMIKIFGDKIKGYILNLDENTENDAPNFIKNYSVYDIWHAVFHFDEEYLEKLAKTNFKIGNVEVTRNKKKIEISPLVLLKKSLMLGYADLSLKVMRKIIPFLREGFIYNKAVLLAKLPELLDDKWDDNKDLIINVINDSNEKYNFQKTIVSIANKLIEKHKALEYPNNFAYKDFDYILDSSDENDICGACEGYFGEKTWESIANRNIYIQEVGLLYQEYFSDSKRAYRETQTLKDLVEKEFKELGLYLNGELYHHSMRKNIYGNPIKYNKSGVMIDVLPEPRIDSIRNPMFNKSMSILRKLINELIVSGDIDNDTEIIIEIARELNDNNKRAAIERFQNQRKSKREKYRAFLNEFKERENSSINVDQSISTFELWSEQIFDDKEGKNIKELRTDSILNEKDALKRYELWTEQKGQCIYTGKMISISQLFSNEIDIEHTVPRSILPDNTMANQTVCYAKYNRDVKKNKIPYDCENFSISTPNGSSIELRLDVWKQIRDNYKELFEKRRKPFGGEDENKKNKRIQEKHFYRMHFDYWRDKINRFEAKEIKDSWARRQLVDTQMVSKYAREFLKTYFKKVSVQKGQVTAEFRKMFGFQEEDEIKSRNKHTHHAIDAAVLTLIPVNSSKREEILKKHFEAKESGKKVSQMRPFKDFNSQNLIKNIENNILIVNYQKDKIIQQTKKVVRNRGEIEYLKNKKGDFILNEDGGKVKKTSQGDSIRSTLFKQTYIGKIKAIERDENGKPVRENGNWKYKTGDDEFIYTERKPIKEVLKKTIDIVDPDIRKLVEKQKGNDDIFDFQGNKMRHVRIKVRAGKKVKERINYRSKHEHKNHFYSASGSIPYAVMLHKNEEDTVERKMIPISSYQIAKVFRKTRKFDEVEFVKEYYPEYESYDKKLLKIGQKVFVLQDDEEYNQRIEKEFQRNRFYKITQFKYDGSKIMLQYHLEAQSKSDIDKSIKADKNDILMKYEKSLNIPLITLDKSIIDNNDRNKDYEKRLFDFNKRLKTLENKAGKDLMSKAKKEIEIFKTESSSILAEELTPPILGLSLKNWNFLYEDYDFSINLKGEIKWIE

SEQ ID NO: 24032 - protein, 1379 aa, unidentified
  REGION 1..1379: note = Cas Enzyme sequence
MKRILGLDLGTTSIGWAFVKEAENENEKSSIINTGVRVVPISTDEENDFKKGNSITINADRTLKRGARRNKFRYQLRRKALIDELKLINFINEKTKLTETGKNSSHELLSLRNNAVSEKLKKDEFARVLLSINKKRGYKSSRKANNSEEGELIDSMDITKKLYDHDLTPGEFSFTLLKDGKKSLPDYYRSDLENEFNKVWNHQKKYYPEALTAELFKEVEGKNKNQTWKICEKPFSIKGIKIDGSKADKKLETYKLRKLALSEKIGLEYLAIVLQDINSEINKSSGYLSEISDRSKELHFNNMTVGEYQYKQIAKNPHNSLKNQVFYRQDYLNEFQKIWEKQAEFYPELTNELRDKIQNEIIFYQRRLKSQKGLISYCEFESWEQEVIIDGEKKNKIVGHRVVPKSSPLFQEFKVWQNLNSVRITNVKTNEVYHIEEETNKELFQTLNWIDKLTDKQFLKELGLKPNEWKINFKTVEGNRTNYNLLKTYKEILRIEGYDNIDYSKIDAEDLIEILKKCFDEIGIDKGILEFTSTLKGNPFSKQESYELWHLLYSYEDDFTRTGTESLEQKLKSTFGFKDEHLHSLINISFQDDYGSLSARAIRKILPYLEDGKLYSEACELAGYNHSNSITKKQNEERELKPKLEILKKNSLRNPVVEKILNQCINVVNAIIEDSEMGRPDEIRIELARELKNTKEQRSEMTKAIGRATKDHEKYRDEIKSKFGLPHVSRNDLIRYKLYKELETNGYRTLYTDEYIKPEDLFSKKYDIEHIIPKSRLFDDSFSNKTLETRKSNLDKGDETALDFVGRKYGKEGLEKYRNRVEALYKSGKIKGSKHRKLLMGLKDIPEDFLNRDLGTSAYIAKKAAEILLDITRRVSLTSGKITSKLREDWGLIQVMQELNWDKYEKVGLTYYKENKEGKKLPRIKDWTKRNDHRHHAMDAITVAFTKPGIIQYLNNLNAKSNKEIYKLENAYTFKDERGKRKFIAPFPTIRKASKEQLSQILISFKTKNKVTTKNKNKINIEGNNKFKYQTVETPRGQLHKETVYGKSNYYETKLEKVGGKFDQDYIKLVANQSYRAALLTRLEEFENDAKKAFTGKNSLTKNPIYLNGTQETVPEKVKLAWLEEQFTIRKEVTPDLKIDKVVDEGVKKILKKRLKDFNNKPKEAFSDLDLNPIWLNKEKGIKIKRVKITGVFNAEPLHHSKNHFGVEMLDNNGSPFPNDYVSTGNNHHVAIYRDEKGNLQEEVVSFYEAVTRKNIGLPIINKQHEKGWQFLFTMKQNEMFVFPNEKIGFNPHEIDLLKPENNALISKNLFRVQKFSLIYYGNSAVRDYVFRHHLETQLLDLKATKDITWRALKSSSLLDKIVKIRINHLGNIVHVGEY

SEQ ID NO: 24033 - protein, 1413 aa, unidentified
  REGION 1..1413: note = Cas Enzyme sequence
VLKKNKSHLFQKKSNILAMKSVLGLDLGTSSIGWALVNEAENSEEKSSIIKLGVRVNPLTVDEIQNFEKGKSITTNADRTLKRSMRRNLQRYKLRREELIRVLKESGFISEESILSENGNKTTFETYHLRAKAVTEPISLEQLSRVLLMINKKRGYKSSRKAKSQEDGQLIDGMETAKLLYDENLTPGELSLQLINLGKKKTPDFYRSDLQNEFEKIWNFQHQFYSDILTESLKEELKGKNKNQTWAICEKPFNIAGIKRETKGFELKKETLIWRVKAINERIDLELLAIVLQDINSQIYNSSGYLGGISDRSKELYFKNQTVGQYLVEKLDKDPKVSLKNQVFYRQDYLDEFNIIWENQLKFHNELTEELKKEIRDIIIFYQRRLKSQKGLISFCEFESRQIEMVVDGKKKLKTIGQRVIPRSSPLFQEFKLWQILNNIEVFIKGNTKKTRKQSGSQEKSEDSLKLDDRRRLYLEEKEILASELSIRKEMSKTDVLKLLFKNPEELDLNYKSIEGNLTLAKLFEAYLKIIELTGHSINLKKSAPDIIYAISEIFRSLNINNDILHFNSEKQLDVQPMFKLWHLLYSFEGDASKTGNEKLINKISDIYGFDKEYATILANISFQEDYGSLSAKAIRKILPYLKEGNTYDIACSYAGYRHSKSSLTKEEIGNKQLKNKLEILPKNSLRNPVVEKILNQMVNVVNTIIDDYGKPDEIRIELARELKKSAKERQELTQMITKATVEHETIREKLQREFAVSHVNRNDIIRYKLYEELKNNGYKTLYSNTYIPQEKLFSKDFDIEHIIPQSRLFDDSFSNKTLESRAVNIEKGNMTAYDYVSGKTDSNDLDNYLDRIENLFKTGKISKTKYNKLKMTDADIPEGFIERDLRDTQYIAKKAKDMLESLVRRVVSTTGSITDQLREDWQLINVMQELNWEKYKQLGMTESFEDKDGRRIYRIKNWSKRNDHRHHAMDALTVAFTKDVYIQYFNNVNARYDRNSNAYAIEQKYFQDRKVLPPMPLELFRAEAKKHLDNTLISIKAKNKVVTNNINITRKQTGFNKYKQQTPRGQLHLETVYGSQKKCVVKEEKIDGKFNEEKIGTVTKPEYREALLNRLIQYDNDPKKAFTGKNCISKNPIYIIDKAGIKHALTEKVKTVTFETIYTIRKQIGPDLKIDKVVDPKVKILLEERLKAFNGDPKKAFSNLEENPIWLNKEKGIVVKRVTILGVSNAEALHNKKDKDNNLVLDKNGKPQPVDYVNTGNNHHVAIYVDGNGNLQDYIVSFFEAVVRKNLNLSIINKDYRCEEGWRFIFSMKQNEYFVFPNEESGFYPKEIDLMDPNNYCIISPNLFRVQKISRLSYGNTIVREYVFRHHLDTTVQEDRLLKNICYKNIKSLAPLKEVIKVRLNHIGQIVSVGEY

SEQ ID NO: 24034 - protein, 1284 aa, unidentified
  REGION 1..1284: note = Cas Enzyme sequence
MFSQRNNPYCDLLQNCTTKIKILFKNKKYFKKILFLSIKTTLNLLVMKKILGLDLGSASIGWAMVLENENSKTTQILGLGSRIIPYEGTEGKDFAKGTGESRNSLRTKARTTRKGYDRYQLRRKYLVDILIKNDMMPSEELKKLPKMELWKLRAKAVNEEISLQELGRLLLWLNQKRGYKSSRSDANLDKKDTEYVATVKSRHETIKQQNLTIGQYFYNELTKDNFYKVKENIFPREAYIEEFDAICKKQTGISSDLIQKIRNEIIYFQRPLKSQKGLVSVCEFEGFYTQKDGKEYFVGPKVAPKSSPLFQLAKIWENINNIKINNKKGEEIILTFEQKTAIFDHLDNNEKLTTTDLLKILGLKKDDCYVNKQLAKGLNGNITKYAIKQCLGNSKAYEQLLKLELNIVQENTEGYLYSKKTGEVLNSKPKMHIDANVEEEPLYQLWHTIYSIADQEECSNVLQKKFNIEKSIADNLATIDFTKHAFGNKSAKVIRKILPYLMEGDGYSDAMSYAGYDHSNSLTKDQNLDRKLLDTLKPIAKNSLRQPIVEKILNQMVNVVNAIIEKYGKPDEIRIELARELKQSKEERNDADKNMSKRQRENETITKRLAEYGLRATRNNIIKWRLYEEIDNQDKKLNAICIYCGQPISLTEAIKGSDVDIEHIIPKSKLFDDSQSNKTLAHRHCNRNKNDMTAYDFMKSKSEQALAEYVERVNLLYSNHIIGKAKRDKLLMTESKIPDNFIDRQLRESQYIAKKAREILQTICHNVWSTSGTVTAELRHLWGWDDVTMNLQFAKYKAIPEMIEIKEWESENGKNKHSKEVIKDWSKRDDHRHHAVDALTIACTKQGFIQRFNTLSSSKTREHMSQIVDECSMEYKEKLSLLEKYIVSQQPISVADVEAAVGNILISFKSGKKVAVTGTRKIGKRGNKKVVQTGIIVPRGSLSEESVYGKIKTLDERKSLKYIFENPHLIVKPFIKQLVDERIEQFEGDYKKALASLKKEPIFLNKEKTIELEYASCFKDEYVIKYTVDVNFNKIDKVIDSKIKEILERRLAKFDGKAKEAFKDIQGENKQQIKWYEDEGLERPIKTVRCFTGLSAVVPVKKDEQGKNIGFVKPGNNHHIAIYTDGEGTRQEHVCTFWHAVERKKYGIPVIINNSNEVWDKILSKPEGTYPESFLEKLPQANWNIELSMQQNEMFVLGMNKNDIEIAIANNDYKAISDNLYRVQKMSVIGERTINIWFRHQLETELKDDANSKKANRFYNVQSIGALFNLQPFKVKINCLGDII

SEQ ID NO: 24035 - protein, 1478 aa, unidentified
  REGION 1..1478: note = Cas Enzyme sequence
MKKILGLDLGTNSIGWALVSQDEKEKVGKIIDMGSRIIPMSQDVLGKFDSGVSVSQTAERTGFRGVRRLRERHLLRRERLHRVLNILGFLPEHYAAQIDFDKHFGQFLDEKEPKLAWKEIEKEGKTTFEFIFKKSFEEMLVDFSKHQPQLLEKNKKIPYDWTIYYLRKKALTEKIEKEELAWLLLNFNQKRGYYQLRGEDEEDINPNKLVEFHSLLVVDVTADEPQKGKDDIWYNIILENGWIYRRSSKNPLFDWKGKIREFIVTTDFNDDGTIKTDKEGKEKRSFRAPAETDWTLVKTKTEQTIDKSGKTVGQYIYDTLLQNPSQKINGKLVRVVERKFYREELKQILETQQKHHSELQNKELYNACLEELYEYNEAHRSNIVQRGFTYLFLNDIIFYQRPLKSKKSQISDCRYEERKDKNNIIHPVKCIAKSHPLFQEFRLWQWIKNLHIYKKENDESPVTTIFLTNEDDYVNLFDFLYNRKEITQEALIKYLLEPQKLRGKALSEEVSKYRWNFVEDKIYPCNETRSTIKSRLDKCTSVPIDFLTNEKEEALWHILYSVSDKNELEKALKRFAEKNSLGDDFVEQFKKFPPYKNEYGSYSAKAIKKLLPLMRMGKYWNEAVIDKKTKSRIEKIITGEVDEKIQTRVREKAINLTDISHFKGLPLWLACYVVYNRHSEGGDLQKWKTTADLGKYLKEFKQHSLRNPIVEQVITETLRVVKDIWQTYGEGQEDFFNEIHVELGREMKNPADKRKRITNQNTDNENTNLRIKALLIEMLNDREVENVNPYSPNQQEILKIYEDGVLNSDIEIPDDILKISKTAQPSQKELIRYKLWLEQKYRSPYTGEMIPLNKLFTSAYQIEHIIPQSRYFDDSFSNKVICEAEVNKLKDNQLGLEFIQNHEGEKVLLNFGKPVEILSETAYRDFVKKNYSYRDPKSKKLLLTDIPEAMIERQMNDTRYISKEVKNLLSKIVREEKEDDGTTSKNVLACNGQITTALKRDWGLNDIWNDIITPRFKRLNEMTNSNNFGKINSNTNKFLPEVPYEYQKGFQKKRIDHRHHAMDALAIACATRNHINYLNNQNALEKGKTKEQKQKSREDLRRLLCDKKYNQGEEGNYRWIFKAPWNNFTIDAKNKLSETIVSFKQNLRVINKTVNKYDKWQKDTNGQLKKVKATQEKGDSWAIRKPLHKAFVFGEINLSRVNVPKGKKIVAIRRSLDTSFDLKKIETITDTGIQKILRNYLQMKDNNPQIAFSPEGIEDMNNNISVYNEGKTHKPILKVRSFEVGSRFALGIKSNKKDKYVETADGTNLFFAIYERKDNKTRMFETISLSEVVEHQKQQNAYNVPTVDRTVIPIKKYLEYRGKAVEVVFLFHLSPNDLVYVPTEEERENAQIDWSNLDREQMKRIFNVNDFSSTCYFTPNSLAKNIVPKEVDLSFDRTKNKLSGSFDTKTASCDGVQIKDVCWKLQVDRLGKIKKVIR

SEQ ID NO: 24036 - protein, 997 aa, unidentified
  REGION 1..997: note = Cas Enzyme sequence
MSGNTLGLDIGSNSIGWALLNLDGNPSIIDAGVRVFQEGVNRDTKGAEISKNETRRMARGARRNRFRRNYRKDKLLRLMKRCSLFPNGETVNGDIFLADPYTLRARGLDKKLSLHEFGRVLYHLNQRRGFLSNRKSSKGKDDGVVIKSATELQQRMDAQGARTLGEYFAGLDTLQERIRDNYTFRSMYQKEFDLLWEKQTSFYPAILTTELRQKIADATIFYQRPLKPTDELIGDCVLEPGQKRCPKGDWFARRFRILQDINNLLVCEPDGKERKLTDTEREIALKNLTASKEVGFDSLRKKMGLLETQTFNLEEGSFDKKNAKMQGDFFAATMGKIQGKKVWEAMDTATQNEINDLLMSDDFTDEQVVQMLKQQHNFSDEQAQAAIEIGFPRGYMSYSRLAIQKLLPHMERGLRTDEAVKAAYNHIHSAQDNGQTVDVLPLPKDLRNPIVNKALIEARKVINAIIRTYRKPEKIVVEMARDVKGSAKEREELRFKIAENERENKQAEHELIHNIGITRPTRDDIIKYKLWQECGRECPYTGRTISQQALFGEHPEFQIEHIIPYSRSLDDSYMNKTLCYVDENRRKGDKMPSEFYQGTEQYEHILQRIRRLPYPKRQKFSQKEASLDEFIQRQLNDTRYITREILAYLKQLGCIVTGSRGKVTSELRHQWGLNSILDSDLPGLKNREDHRHHAIDAVVTALTSQKHLHELAVTKYAVHHDGFPTPWEGFRDAVSEAINKIQVSHRVTRKVSGPLHEETSYGPTGLKDDKGQDIFVYRKSLEVLTCPMVEKIVDPVVREIVKARLLNFGIDPEKKAAISKDVWKEPLYMKSNNGAKVPIKKVRIRDVFNNMIPVKDTSRKPYRYVASGNNHHIEIFEYTDAKGNVKRDGKVISMFEAVRRSRQGKPVVCRDYDDGKQFVCSLAKNEMYMLEVEEGRHTLHRVQKIIQDGRIVLRPTTFAGKLSDTDNSPLIQRKNFNTIRGYKVTVDPIGRIFPAKD

SEQ ID NO: 24037 - protein, 1397 aa, unidentified
  REGION 1..1397: note = Cas Enzyme sequence
MKRILGLDLGTTSIGWALVEESKNTKDSKIIKLGVRVNPLTTDEKINFEGGKPITTNADRTLKRGARRNLDRYQMRRDNLIELLIERNMISSETPLTEIGKNTTHQTLALRARAASAEVSLEDLSKILLSINKKRGYKSSRKSKNESDGVAIDGMAVAKILYDQKLTPGEYGYNLLKEDKKYIPDFYPSDLKEEFNAIWQKQREYYPDTLTDALYQDLQGKNKGQTWTICSKPFQIDGIKLKGSKPEQKLERYSSRVKGLKQKLDLEYLAIALQEVNNNINGTSGYLGKISDRSKVLYIDKLTVGEYLYNQIKKNPHVLLKNQVFYRQDYLDEFEQIWETQVKFHPALTPELKSEVRDITIFYQRPLKSQKGLLSFCLFESWEQEYYDKVKDRTRKRIIGQRVIPKSSPLFQEFKIWQNINDLEFKYIGKEEKSDDTQDSRKPYKLDEEDRIMLFTEANIRGNLSSASVLKLLGLSSKNWKLNFKDGIKGNTTNEKFFNVYQEIALREGYGDSWQKKSAVDILNELKTIFAEIGIDTSIFDFDSTLKGNEYSKQASYELWHLLYSAGDDSLVSEDDKLIYGNSDVNLKKKLHQKYGFNPEYAAMLAHLVFADDYGSLSTRAIKKIIPHLERGLDYSVACNEVGYNHSNSLTSEENENRELKERLQILGKNSLRNPVVEKILNQMINLINQLIDTYGKPDEIRIELARDLKKSAKERLEETSYINTATKRNLEIASTIQKEFGFTPTKNDITKYKLWQELAPRGYKSLFSDQYIAKADIFSKNIDIEHILPKALIYDDSFSNKTLAYRNVNLKKANRTAIDFITQDQSATLAEYIARVGGLYNKGKGTISKGKHDRLLKSAKDIKEGFIERDLRNSQYIAKKARNMLLEVFRVVTPTTGRVTDKLREDWGIINVMKELNMPKYRELGLVYVEERKNGKQVEKIKDWTKRNDHRHHAMDALAVAFTTHSHIQYINNLNARRDEAHEKHKIIQNIENLITHKVEDDKGNYRRCFVKPMPRFRTEAKKHLAAVLVSFKTKNKVVTRNINKTKKEGGFNKNLELTPRGQLHKETIYGKSKIAKTTPTKVNKRLSLEDVRNIIQTGQRTLILNHLKSFDNNSEIAFDTKTLKKNPIIWNKEPLKEVFCFEEVYTIRKDVGPDLKIEKVLDDGIKNILQKRKDEHNGNAKEAFSNLEQNPIWLNKEKGIAIKRVTITGVSNAEALHYKKDHLGDFILNKSDKKIPVDYVSLGNNHHVAIYSDEKGKLQENVVSLYEAVERAQQKLQIIDKSFNSHLGWEFLFTMKQNEMFIFPSDEFELSSIDLKKEDNSRLISSNLFRVQKISSKNYVFTHHLETQAVGADTFKNQKELSDITYRFYQSEKYLEGIVKVRLNHLGSIAQVGEY

SEQ ID NO: 24038 - protein, 1472 aa, unidentified
  REGION 1..1472: note = Cas Enzyme sequence
MKRILGLDLGTNSIGWALVNNDFNKKEGNIQGIGSRIIPMSQDVLGKFDSGTTVSQTADRTSYRGVRRLYQRDNLRRERLHRVLNILDFLPEHYAKDIDFLKRLGQFKPDTETKLPYRKDGNDNYHFMFQDSFLEMVEEFKSVGYDQKLPYDWTLYYLRKKALSKKITKEELAWVLLNFNQKRGYYQARGEEEEMEEGKSKEFVQLKVKDVINSGDEVKGNILYDVIFDNGWSYDKQITKTEDWIGKTREFIITQTVQKNGTIKRSFKKVDSEIDWIAIKEKSQQDIDTFNFENKTVGAGTYIFDTLLQKPDQKIRGKLVKTIERKYYREELAAILAKQVEEHPELRDQNLYELSINELYRHNDAHKSNIKDKGFKYLFVEDIIFYQRPLKSKKSTISNCPYETRTFIKDGKKEKQAIKCISKSNPLYQEFRLWQFIHNLKLFEREAKDGHRTKLNHDVTRQYLESQEDYTKLFSFLNTKAEISQTGLLRFFKLNDKTHRWNYVEDKKYPCNETRSEFIKRLSKIDGLDVKVILSNTFERELWHVIYSVRDKNEYVKALKTFAAKKGIDKDGFCENFEKFKPYDSAYGAYSEKAIKKLLPLMRRGEYWLVDDISPKVKDRITSIMERVKELNSDLDKIEKLADDDIPKQLLKSFVKTKDAFQGLNTYQACYAVYNRHSEVGDIQQWKKPEDIAWYLDPKNPKGFKQHSLRNPIVEQVVTETLRVVKDIWDYYGEGKVGFFNEIHVELGREMKNDKKTRKRISDSITENENTNERIKNILRELMNDTEVDGDIRPYSKGHQDILRLYEEGVYSNSEDAYKSIKLDEIDKIRKNNSPSKSEIIRYKLWLQQGYISPYTGDPIPLSRLFTTDYQIEHIIPRSRYFDDSMGNKVICESEVNALKDNQTAFEFIKNNQERIIDLGQGKQATLFSLDSFEEHCKAYFKGNNKKLKMLLSEDIPEGFISRQLNDSRYISKVVKGLLSNVVREEGEKEVTSKNLIPVVGSITSKMKKDWGLNDVWETLITPRFERMNQITDSNEFRKQTTDGNGNTYWINTVPQDLAKGFTKKRIDHRHHALDALVVALATRNHVTYLGNLNANERDKRQDLKRVLCFKTKPDANGSYKWQFYKPWPEITENTLRALETTVVSFKQDQRIINKTNNKTTRWEKVDGQWKKVLRKQVGRNWAIRKPMHKQTVYGKIDMPTPKGKIATAVRTSLSDITTRKRLEAITDISIQRILENHLKSYLDDKGKEQFDKAFGEDGIVALNAKIKSLNGGKPHQPIYKVRLYEVGVKFSVGEAGNNSSKYVEAEKGTNLFFNIYWQENKGKRTYNTVPLNEVIAHQKWRASLDKEDMKKIPLVPIDNTKGSFLFSLSPNDIVYIPNDEEVSNKNLVDFSNLKNEQVNRIYKMVKTSGKECYFIRYDIAGLIKQYDAKSKTGELGSQNKLITTMDINSFKIVDRCWKLKSDRLGNLKRLV

SEQ ID NO: 24039 - protein, 1437 aa, unidentified
  REGION 1..1437: note = Cas Enzyme sequence
MKKLGLDAGSSSLGWFLRNGKDIIKYGTIIFDSGMIKGTSGYSSPTKDRREARLKRNPIKARKYRKTLILKTLIENEMVPLEILELQLWSDYKKGRKNKFPSNDNFKDWLACDFRFSKGENYKNPYELRVKALDTKLAKMDLGRVLYHLVQRRGFKDIGEKNDETIKQKKRREESGFQEALNNSRSIAEALQKEYLEKDKRARDNYPYRDEYEEELLKILAKQGLSLEKDEDKKYKDEFVRNIHKAIIWQQPLKTQKGTIGKCTLEPSKRRCAYSHPLFEVFRALQFINTIKFKKEKDDDFLAISQEYRDKLLLSLFLKESGNFKFEKIRKFLDKQFKQKMIYNYRFDSKKQTYESTVSGMPFCKVAIKYFGDIAKKDILEVENYKQDSMPKNYGNYSLLDIWHNVTEFDNEKLTELGLKMKLDLVERKRNGKIEYVSPLIIIQESLPQGYASLSQYVIRKIIPLLKKGYLYNDAVLLANLKDSLGENFEVHKNSVNEILKKANKEYLANKLIITITNKLIEKFKGEEEANLNGLESERFAHNDFEFQLRSSDKIDIINACISYFGESKWLNYDNKDFLIENVSKQYQEFFFDTERKFRNITKLQELFENYLDENNIILNKPLYHHSKQENIYGKTIKFKDTDIDILPLAKSNSIKNPMFNKAMGVIRKLVNQLIVDGDIDKETDIIIEVAKELNDNNKRIAIEKFQKQREAKRNKIRQFLEEYKSQEKQSLNVEESIVQFELWDEQIFQNTEDENGQTQKNTDRKDILKLNKSINRYELWMEQKGQCIYSGKMISISQLFSSTTNIEHTIPRDILPDNTMANKTIAFRYYNTSIKKTEFPANLPNFNKNTKEGSAIEPRLSKWKEIREGFKIAFESRQKAKGVEDENTKNTRIQDKHFFKMHFDYWSDKLERFEKTDVNDKWARRQLTDTQNISKYARQFLKTYFTRVGVQKGSTTAEYRKMLKLEDNDNPKDRNLHTHHILDAGVLTYIPTNASRRDKFMKLSYKIRENNNKQFHYIPHKNFDAQKIKKEIETNTLIYNYTKDTLTSQTFKKVRKSGKIQHKKDKNGDKILSEPIISRGNTIRASLYKDSFLAKIKDVERYEDGQPKRNKDNSDWKYKTGKDEFIYAKKEPISKITDKNVNQIIDKNLAKLIESQLGNDKILDWQGNEIRHIRIKKKAGKIVKQRLDYRSDKEHKNFYYAESGEIPYGVMLFNSKNDERILLQVHAYQVANIYREKRKFDIEYFVETFYPNFKEHQKLLLKVGQNLLILNDDAEYENRFSKTFQRNRLYKIIKIGDGSLWLKYHLTATADSDLDLLIKIKKDEILWSYEKQLGLSKILPDEKIDDVKTKNEDFERRKYKLNSYKDFRIKRIIDNFGKNKASDIKSELDKYKKVSSFIEIEGETHLLKLNTSKSWNFLYENEDFEISILGEIRFLK

SEQ ID NO: 24040 - protein, 1789 aa, unidentified
  REGION 1..1789: note = Cas Enzyme sequence
MKRILGLDLGTNSIGWALVEIDHEKGVVKIVGLGSRILPMDAGEINDFESSGKIKSTAAQRTEKRGPRRLNERYLLRRDRLHLVLNLLNALPNHYKLEIDFSNSKGEKSGKLKKYKEPKLAYIPMQKGGKAKFLFTDSYNEMLTDIGSKRVKNEKGKRIPYDWTLYYLRNKALSQKISLEELAWVLLSYNQKRGYEKTEVEDKSTKDGELIEEFDLRVKEIALKTDEAGRQFFEVHLSGNDQFVYKEYSNIQMTFKNDLKEVVKKSYLKNNGAIESEKTEFKIIDIYNLSIQDVQFQKENGKHKYTLTYHNGWIEEKPPIKNFTYKYKNARNKPFDYIVETTFTNEGEIKLQQRKERKLREPDLSDNSSDWTLLKKKTEKEALTFNNKQGLKNDNESIKNYISPSIYHVIKRDAATAKRTKIIGGMFQVVDRDFYREELNDIIATQRRFHKDTLDDKKVFEQCVKTLYPKNDSHAKGLLANKDAITNLLVEDVLLYQRPLKSKKSEIANCKYEIRYWKDVEDKKGNPIEEVDIVTGELKITKEPVYIKVVSVSHPYFQEFRIWDKLHNIKLIQLEKVVEGKALTNQDVTKDFFKSAKEYQELFKYLNNRKSLNQDQFLSYCKKKFNIDYTKKDSNYAWNFPEDDELNGNETRVSFATRFIRCGLTDYSEFLTQDKERELWHYLYSVSYKERTVNNNKSAITFFNNFFKNCDIDERIKEKIINDFTNYPKFASRYCAYSEKALKKLLPLIRLCKPKVTDKWATELWYINWSKSLEERKVELLERLNRIEFKPNDGEKVDFSNAVKLNNDLKKGKYPFPKGMFNAFRGFDNLGDFASLNLTQASYLIYGRHSELAQAKYWTSPKDIRKQLHQELKQHSLNNPVAEKVLLEMMQVVADIWDYYGNGCVKFFTKINLEVGRELKKSAREKESDSKMMSGNRSQNKRIRQVLKEFLSTSPYNANPKNSDHFERLKIVEESAEHTKNTNKDFFKDKSYNKKDIEDILKKSSINKKDFEKYKLWIEQGYRSPYSGLVIKITDLFDGNKYNIDHIFPQASITNNSFSNKVVVEVELNKLKSDKTARAFIQSQKGQPYLGIRVCSEDEFVNIVKTQFSRTKRLILLSKEIPKGFTNSQMNNARHIARKAMELLSHVVREPGEVEFRSKNVLPVTGMVTTILKRTWKLDQVWKELVSPRYIRLNELTQSELFGAWKKTKSGQDYFDCNLDESIREKDSSYDIKRIDHRHHALDALIVALCTEEHLNYINNINSNANSKDLGKQLQIEKYRKSIKRKIKFTKWDDEQNEKNWYFLLPGEIRKEGAQNSNRESVLEKTYALKDFDTFGQDYKKMVLTALQDTVVTFKQNLRVINKAVNRYNNTPNKNSFVLQKGKEVGNKANWAIRRKLSKETIYGKRLINNEVKRVERELLNEKFNLARIQKITDKGVKRILINHLRQFDTVEIPFNEAIVFIDAIVEKDEFEAIVNDRENEFQSIDALIEYLRENGYKYKKVDYSKLNVFIDKVSVRDIRNDTQYADNIKEHPEIAFTPEEIENMNEPEQIQRLNEGKFHMPIKKVQTFQGFGKERPISDDDLSVKSKQFVVTAAGSNLYLGFYERIYRDDDGNEVRERKFKDIGLMELIETLKQDKINRLNPLPEKLYGKNNEEYSWRFTLSPMDLVFVPTEEEIENPTKVDFNNLTKEQVGRIYRYVDGSEEIANFIPCTVSKPIWRFHGKKNEEIFKELSTKDKITIREKELIQNEFGLGSQQNKHQNMIDGKTQIKKICWKLQLDKLGNISRFYK

SEQ ID NO: 24041 - protein, 1633 aa, unidentified
  REGION 1..1633: note = Cas Enzyme sequence
MSKKVLGLDLGTNSIGWALVEQDFDEKYGRILEIGSRIIPMAQDILSDFDKGNTVSQTATRTKYRGVRRLLERNLLRRERLHRVLNTLGFLPDHFSEKIDKYGKFSGDIEIKLPYSEFNINTKKWDFIFKSSFEEMVLDFRKSSPQLFFIKKNGEESKIPYDWTIYYLRKKALKDKIEKQELAWILLHFNQKRGYYQLRGEDEIINENKKEEFHCLKVVEVTAGEKGKKENEIWYNVVLENGWIYRRTSQYPIYDWVGKNRDFIVTTELNDDNSTKTDKEGKEKRSFRSPKEDDWNLIKKKTENDLTNYLAQSKLHTVGFYIYENLLLNPALKIKGKFIRTIERNFYKEELEKILETQIKFHPELNDDEYYKDCCDALYEQNDIHKKNISNQGFKYLFVDDIIFYQRPLKSKKSEISDCPFESRKYIQNGEEKSNTLKCIPRSHPLFQEFRLWQWISNVRIYQRSSPFDIDVTETLLSSELQLESLFEFLIGRKDIDQNTLLKYLLEPQKLKGKVLNDAVANYRWNYIDDKEKTYPCNETHSLIANRLSKVENASNHFLTQDNEIKLWHILYSVRDKNEIIKALKTYISKYNRNYKTNINEDQFVENFKRYPLIKSEYGSFSEKAIKKLLPLMRLGKYWVENHIIENMDLYQKSKNAVIDKINLRENTKSEIKEKLLSLGDDINGYKGLRKEIATYLVYQIHSENSDTSKWNTPNELDLYLKQFKQHSLRNPIVEQVITETLRVVKDIWVQYGESAKEFFDEIHIELGREMKNNAADRKAITENNLQNENTNLRIRAMMTEFATYTSDVEKVDKINPQSPYQQEAFKIFEDGVLKSGIELPEDVVKITKSSSPSRNEILRYRLWLEQKYRSPYTGQVIPLSKLFTTEYQIEHIIPQSIYFDDSFSNKVICESVVNAKPYKDNQFGLEFIKNQGSAIVTELSTSGRTVKIFNEDEYRKFIETHYASNKAKSKKLLLEEVPDKMIERQLNDTRYISKVVKNLLSKIVREGKDDEGYTSKNVLATNGTITNTLKHDWGINDLWNDLMLPRFVRLNQLTNSNNFTYYNSSHHKFLPTVPENLRKGFQLKRIDHRHHAMDAVVIACTTRNHINYLNNSAGLDKDKKERQNAREDLKRVLCFKTKPDASGNYKWQFYKPWETITQDTKAYLEKVVVSFKQNLRVINKTVNYYQKFVDCKKALVKQSKGENWAIRKPLHKETVYGKVEIKVDLAKIISLNNAIDNWHLIINPEIKNRIKLKIKESNNDLKIVKKYFKENPIVIDEKTIDRVCVYEWVSGTASRVALDESFDENKIKTRLTDSALEKILLNHIKKYNNKIDDKGNEIAPHLLAFSPEGIEEMNKNILALNEGKKHQPIFKVRIYEAGNKFAVGYQGNKKDKFVEAAKGTNLYFAIYTNESGKRTYETIPLNIVIERLKQGLSPVPEKENNTVFWLSPNDLVYIPSDDESENISNINFNNLKKDQVGAIYKFVSCTSGEGHFVPVSYSKDILKNEMGTNNKSERPINLNGFDKTKMIKEKCIKLQVDRLGNIKLYQPKYKQQYLKTQNTDQRIIISEPTSIYQTKPKLTFYKDFNDMENSRIDYVLQTHAVTRIKNTVELIKRIFGEEKCSSGISPKKLYFK

SEQ ID NO: 24042 - protein, 1377 aa, unidentified
  REGION 1..1377: note = Cas Enzyme sequence
MKRILGLDLGTTSIGWAFVKEAENVNEKSSILNTGVRVVPISTDEENDFKKGNSITINADRTLKRGARRNKFRFQLRRKALIDELKIINFINDKTRLTETGNNSSHELLSLRNKAVSEKLKKNEFARVLLSINKKRGYKSSRKANNSEEGELIDSMDITKKLYDHNLTPGEFSFMLLEDGKKSLPDYYRSDLENEFNKVWNHQKKYYPETLTAVLFKEVEGKNKNQTWKICEKPFSIRGIKINGNKAEKKLETYKLRKLALYEKIGLEHLAIVLQEINSEINKSSGYLSEISDRSKNLHFKNMTVGEYQYKQIAKNPHNSLKNQVFYRQDYLNEFQKIWGKQAEFYPELTNELRDKIQNEIIFYQRRLKSQKGLISYCEFESWQQEVILDGEKKNKIVGHRVVPKSSPLFQEFKVWQNLNSVRITDIKTNEVYHIEEETNKELFQTLNWTEKLTDKQFLKELGLKPNDWEINFKTVEGNRTNYNLLKTYKEILRIEGYDNIDYSNTSGNDLIEILKKCFDEIGIDRGILKFNSTLKGNPFSRQESYELWHLLYSYEDDFTRTGTESLEQKLKSTFGFKDEHLHYLINISFQDDYGSLSARAIRKILPYLEDGKLYSEACELSGYNHSNSITKKQNKERELKPKLEILKKNSLRNPVVEKILNQCINVVNAIIEDSEMGRPDEIRIELARELKNTKEQRSEMTKAIGRATKDHERYREEIKSKFGLPHVSRNDLIRYKLYKELETNGYRTLYTNEYIKPEDLFSKKYDIEHIIPKSRLFDDSFSNKTLETRESNLDKGGETALDFVERKYGKEGLEKYRKRVEELFKSGKIKYSKQSKLLMSLNDIPEDFLNRDLGTSAYIAKKAAEILLDITRRVSLTSGKITSKLREDWGLIQVMQELNWDKYEKVGLTYYKENKEGKKLPRIKDWSKRNDHRHHAMDAITVAFTKPGFIQYLSNLNAKSNKEIYKLENAYTYKDERGKRKFIAPFPTIRKESKEQLSQILISFKTKNKVTTKNKNKIKVEGKNKFKYQTIETPRGQLHKETIYGKSQYYETQLEKVGGKFDQELIELVASKTYRKALLKRLKEFENKPKKAFTGSNSLTKNPVYINGTQETVPDKVKLTWLEGRYTIRKEVTPDLKLDKVIDEGIKAILKKRLKEFSEKPKDAFANLDKNPIWLNKEKGIKIKRVKITGVSNAEPLHHAKNHINQELKDKYGNSVPTDYVSTGNNHHVAIYKDDKGNLQEEVVSFYEAVTRKNIGLPIINKHHEKGWEFLFTMKQNEMFVFPNEENSFNPKEIDLLASSHQSRISENLFRVQKISTKNYMFCNHLHSLAITSDDLKNKKMLSGNIYHFIQTPEKLNKIIKVRLNHLGQIVKIGEY

SEQ ID NO: 24043 - protein, 1242 aa, unidentified
  REGION 1..1242: note = Cas Enzyme sequence
MKNKVLGLDLGSASIGWALISEDKVKESTEIIDLGCRIIPYEGTEGQEFEKGTGESANAKRTAYRRARRNFDRYQLRREFLVKTLVKHKMMPGEDLIKLPKMDLWELRSKAVTEKITLQELGRLLLLLNQKRGYKSARSDSNLDKKDTEYVATVKGRHEFIKEQGVTIGQYFYNELKNDEFFRIKENVFPREAYQEEYDAICKTQQGFHPELTDELINTIRNKIIYYQRELKSQKGLVATCEFEGFQVTRDGKEYFAGPKVAHRSSPLFQVTKIWESINNLRIRTKTGDEIYLTPTERQQLFDYLNENEKLTFKKMCSLLSWDESNLYVDRKLYTTGLQGNTTKTVIGKLLKGSPDKEQLLKFDLKVIEDLEKQTFLVDKNTGEILEGSETNVKHIDKAIEHEPLFRLWHTIYSIPNAQDCIKTLIKNFHIDKTTAEALTSLDFNKYGYSNKSSKVLRKTLPYLMEGYGYSEAMALAGYNHSGSLTKDENLARLLLDKIPLLPKNSLRQPVVEKILNQMIHLINAIIEEYGKPDEIRVELARELKQSKEERRDTESFIRRRTRENDIISKELEEFGLRATRNNIIKWRLYHEIKNEEKKLNAVCIYCGQPISYTEAIRGANIDVDHIIPKSRLFDDSQSNKTLVHRFCNSTKGNLTAYDFMKGKSEKEFLTYVERVNSLFQNHLISKTKRDKLLMSADKIPQDFIERQLRETQYIAKKAREILSEICRNVWSTSGSVTSTLRYLWGWDDITMDLQLPRYREVNQTELVSWESNHGKHTHTKEVIAGWTKRDDHRHHAIDALTIACTKQGFVQRINTLNSSQTRRKLQEEVADFIPDEKERFTLLEKYLISKQPIPVKDVQDAVADILISFKRGKKVTTPGTRKDKLKGKKQVVQKNILVPRGPLSEESVYGKIQVLQKEKPIKYLFENPDTILKDYIKQLIMDRLKGHDNDAKKAVAYTRKHPIYLDKDKKQVLEYATCLQHEYVIKYPVDTTFNKVEKVIDEKIKELLLTRLEKHNNNPKEAFKDVVKEDKTVLKWYQDEGLPTPIHSVRCSTGLSAIVPIRRNSDGKDIGFVKPGNNHHIAIYQDANGNYMEHVCTFWHAVERKQYNIPVIVKNSTVVWNKINSLEQSNLPLSFIQNLPPDGLNLQYCIQQNEMFVLGLTREEVNTLIDTQNYNTLSNCLYRVQKISTRDYYFRHHLETQVIDTKEGHKANRFIRTQSIKAFLALNPINIKVNLLGKPYL

SEQ ID NO: 24044 - protein, 1390 aa, unidentified
  REGION 1..1390: note = Cas Enzyme sequence
MSKTLGIDAGSNSLGWAIRDTSNESNQIIDYGVLTFDKGVASEKGNEFPKVQKRTESRGKRRNYQAEKYRKWELLEFLIDKNMCPLTLDELKLWKGYSKNKKREYPQSEKFINWLRFDFDEDGKPDFHLFNSGKDESYYVFRANAIREDFKEVYSKNPHILGRVLYQLVQRRGFRGRDEEEAKTMLQGSDKTGTKGRNDIAEYIEKHKSLGAALYYYQKDNGGRIRQRYNLRKDYENELKEICRVQGISDEDYQRLWKAIIWQRPLRTQKGLIGICIYEKNKKRVAISHPLYEEFRTWVFINNLKIEPPIGIEKSTYLKEKIYPLFYKSSNDFEFKTILNQLKKDKATIHSKFKEKTKVVSAKLLKSFQDILGDDWKEKYQWYSINDRDSQPKKKSDTSYTFEDVWHVLNTFDGQENLKNFALEKLNLDEDKAEKFSKIKLNSGYATLSLSAIKKMIPFLQRGFMYHQAVYLANLYKVLGADKITDDLIDYFAEEIEKIIKNNQEEKTLNNIVNSLIQDELNNEYRYSIEIDRELDSEELRQIQHKIVDVYGEKTWSEFDDEKKSYVLSYVSTHFKEFLKKSVLSKQNIFIKQPRLHDQIFALIQEKYQVPDVAKKHLWHPSEQDTYLPANEYDFFKLNGKNVFIKEDDIQKFLRNNPEAEHQGKRLKLLGNPEPISRGFKNPMALKTLYKLKHLINYLLQQGKIDEETRVVIEIARELNDANKRKALERWNTEREKENEGFKKIIREINKECGTNYDDNDKTLIRKIRLWKEQNGICLYTGAMIMKSDVFNASKYDIEHTIPASISFDNELRNLTLADTNFNRNIKKKLFPTQLQEYEKIKPRLKFMEDKVEHLEELFKEWKNKASYASTKEIKDSCIQRYHLIKFELDYWKAKLHTFTLEEYKAGWKNSQLRDTQIVTKYALPYLKTVFNKVSVEKSSVVNAFKEIYKVKITGEKKDRRVHSHHAIDAAILTLIPPFYERDKILLKYNEEIDRKTGKVYHERPIDWKDFSASKILNIEDEILINNLIESKTTLPAAKKVRKRGRVEYLRYKDQNGKWQYRLDNKGNKIPKIAQGDTIRGQLHGESLYGAIKLPLRNEENQILFDENNKMILSEEPILVIRKDLVYKKDANSPGFKNLDEIEKVIVDTDLFQMIKKQVEDAPDFKTALTNGVYMLDKNGDKVNKIRRIRCKELLKYNTAVKVHSHSFKSDKEHKRYTLAKNGENALCLFYKDNSAKGIRILSIGEVANSKIRNDKKYFSEPYYNHIEVGKGKNKKAVPLYAVLRSGHKVLFFKDSIDELKDLHRDGNYKELSKRLFKAYQFESDGRIKFRHHLAAGIDTDLKKVNKEYSSFILEDNPIFLRLRQANWNFAIDGVDFEMKLDGKLTWIDK

SEQ ID NO: 24045 - protein, 1118 aa, unidentified
  REGION 1..1118: note = Cas Enzyme sequence
MQQEKLPYTLGLDIGIASVGWCVLGENRIIDLGVRAFDKAETAKEGDPLNLIRRTARLMRRRLRRRAWRLTKLTRLLKRHGLIEDAGFFQPQRPFQGSLWRLRVEGLDRRLDNEEWARVIYHLCKHRGFHWISRAEEKKAEEDKKGEGGKVKQGLAGTAKLMREKGYRSAAEMVLAEFPDAQRNKHGDYGKALSRILLGDELALLFKRQRELGNPHAEPALETALLGNGDRKSGLFWAQKPALSGQDLLKMLGKCTFEKGEYRAPKASFTAERHVWLTRLNNLRIVVDGTTRPLNEQERRTVLPLPYKQAGDFTYKQLRAALVKAGLLPESFRFAGLSYPTGAQQAEGKAREPETEKLVKLPAWQELRKTLKDKGLETEWESMAGAAAGGQPELLDEIARVLSVYKDDEEVAAVLRRLTLPGGERMVEALLDIRFDKFHALSLKALRKIVPHMETGLRYDEACEKAGYHHSQLHEAGKGDQQYLPPLYSGRDKDGRLVFREDLDVPRNPVVLRAINQTRKVLNAVVRRHGSPAAVHIEMARDLSRPFDERNKIKKDQDEFRARNERDKAEFAAQFGIVGAPRGGDFEKWRLYREQQGKCAYSVEPIDIDRLLEPGYVEVDHALPYSRSFDDSKNNKVLVLAKENRDKGNRTPYEYLDGAGNSPRWQQYVAFVESNKAYRLAKRTRLLRKDFGAKAAEEFRERNLNDTRYVCRFFKNYVERCLKLDADSAAKRCVVASGQLTAFLRARWGLIKVRAANDRHHALDAAVVAACSHGMVKRLADYARRRELEKVREGFVDAETGEIVNPAMFQQLKQHFPEPWPHFREELEARLKIDDPALLRNQMALLGTYPEEVLAALRPLFVSRAPQRRNGGAAHKDTIYGQPDRLKAQGGVTQKVPLTSLTLKDMDKLIDPQRNENLYAAIRARLEAHGGKGEKAFPADNPLRKPDREGNPTGPIVRSVTILIDKLSGIPVRGGIAKNDSMLRVDVFRHRKDGKYHLVPVYVHHAVAKELPNRAIVAFNDEDEWTLIDDVNFEFCFTLYPNDLVRVSLKNEVLQGYYAGCDRSTGNVGLWAHDRNQSVGKDGFIRTGVKTAIALEKFHVDVLGNIYPAPMETRRGLA

SEQ ID NO: 24046 - protein, 1271 aa, unidentified
  REGION 1..1271: note = Cas Enzyme sequence
MKKILGLDLGTNSIGWALVEADNNNIPIRIIGMGSRIIPLNSDDRTQFQRGQTITKNQDRTKARTQRKGYDRKQLKKSADFKYSLKKVLNELNIYPSKELMQIPSIDLWKLRSDAANEESIISPEQLGRILYMLNQKRGYKSARSESNEDKKDTEYVAEVKSRHAQLKEKNQTIGQYFYDELLISNETNRYFHIKKKVYPREAYIEEFDRIINIQRERHDFLTDQVIDRLRNEIIYYQRKLKSQKGLVSTCEFEGFKTAYYDKKTQKESVIFVGPKVAPKSSPLFQLCKIWESVNNISLKVKNPENSKYKWVDRTPSIEEKNEIANYLSHNSNLSFSELLKILRLKKEDVYVNKQILKGIQGNTTYSEIHNIIGNSKWLRFDVRITPSNQKAYLVDKKTGEIKSEQDSILLDPKLEHEPLYQLWHTIYSIKDLEECKNALIKRFQFDDDTAEKLSKIDFNKQAFGNKSNKAMRKILPYLMQGFDYSQSCSLAGYNHSNSLTKEEQSAASILDKLELLPKNSLRQPVVEKIINQMINVVNAIIEKYGKPDTIRIELARELKQSKDERNDADIQNTNNKKLNEEVSRRLQELGLPITKRYIQKYKFIFPTRDKKIKDAQVVNQCIYCGQTFNLSEALSGDNFDVDHIVPKALLFDDSQTNKVLVHRTCNSTKTNQTAYDYISKKGSEELNRYIERVDDWFKRGIISYGKMQRLKVSFEEYSERKKNKKETEADKKLWEGFIDRQLRETQYIAKKSKEILKQICNNVTSTEGTVTATLRNLWGWDDALMNLQIPKYRDLGQTVIKEWVSEHGKRKHQKEEIENWSKRDDHRHHAIDALVIACTQQGFIQRINTLNASDVKDEMNKKVEEAKINYNEKLTLLERYLITQKPFSCAEVEKEAEKILISFKAGKKVATKGVRKIKINGSKKVVQSDIIIPRGALHEQFVYGKIKIEEKDKLLKYLLENPDRIINSGIRNLVKIRLEEHNNDTKKALASLKKSPIYLDSNKEIILEKASCYKEEYVIKYKLQDIKAKDIPFIVDPKVRHLVKTRLEQHNGKEKEAFKDVLWFNEEKQIPIHTVRCFTGLSAVEAIKKDENGNDIGFAVLGNNHHIAIYKNTEGNQIQHVCTFWHAVERKKHQIPYIIKDTSLLWDTILEKELPQSFLEKLPPNNLELQFSLQQNEMFILGLSKEEFEDAIQNANIPLISKHLYLVWSVSDNNYWFRHHLETKNSELKNTPYVKESKRLYNIRSLGALFNLNPIKVRLNHLGEITKIGE

SEQ ID NO: 24047 - protein, 1466 aa, unidentified; identical to SEQ ID NO: 22769
  REGION 1..1466: note = Cas Enzyme sequence

SEQ ID NO: 24048 - protein, 1238 aa, unidentified
  REGION 1..1238: note = Cas Enzyme sequence
MKKILGLDLGVSSIGWAFIEENESDRKILGMGARIIPLSTDDKDEFTSGNTISKNQKRTLKRTQRKGYDRYQLRRENLRKALQEKDMLPDTDLINADKMIIWKLRNDAISEKIGLKEIGRVLLHINQKRGYKSTRSETNLDKKDTEYVAEVKNRFEKLREADETIGQHFFRELSADRYYRIKDQVFPREAYMEEFDKIVEKQRIFYPELFTKEFINKLRNEIIFYQRPLKSQKKLVSLCEFEKRLVETDDGQGNRVKKFKGPRVAHRSSPLFQVCRIWENINNIRIKDKYGKEYYIPLEKKWEIFTCLENHEKLTFKELLKILGLKKNEEWTGNSMLDNGIKGNTTRTRIAKCLGSDVSAADLLEFKAEIINDGESMDHIVHDTGEIITVFRKKIAEGIEKQPLYKLWHTIYSIKDENECSSALIKNFGIPKETADKLAVIDFTKEGYGNKSARAIRKILPFLMEGFKYSEACQFAGYNHSWSLTKEENQTREILDLLPMIEKNSLRQPVVEKILNQMINVVNAVIGEFGKPDEIKVELARELKQSREERQKTYKNINQRERENEVISKRLTEEYHQRATRNNILKWRLFHYVKGDDSKVNNICIYCGKAFSISDALSGAEVDIEHIIPRTLLFDDSENNKVLAHRKCNQDKGNLTAYDFMKTKGEIDFNEYIDRVTNLYNEKIINRIKRDRLMTPAEKIPKDFIQRQLRETQYISRKSIELLSRVCREVHPTNGTITEFLRRLWGWDDVLMNLQLPKYREAGLTELIEVEKNGQLHKKEVIKDWSKRLDHRHHAIDALTIACTKQGYIQRINSLSSDISREEMYKELSETDPRKAAWKTLLERYLADKQPFTTNEVKRMAERIMVSYKPGKKVATKGVRKINIHGKKKIVQRGITIPRGPLSEESVYGKIRITEKKKPVKFLFENPHLIFKDRIKKLVEERLARYKGNSKLAYASLKKEPLFIDNEKNVKLEYGTCFKEAFVIKYPLSSFKAKDIDSVVDDNIRQILRNRLAEYKGNEKEAFRDLENNPVWYDKEKRIPLKTIRCFTGLSSVEPVKYDENMKPVGYVKPGNNHHVAIYVDENEIKHEHVCTFWHAVERKKYGIPIIITNPRQVWDGIINQNKNLPESFLDKLPADNWKFITSLQQNEMFILGMNNEEAVQAIERNDTAFLSNYLYRVQKIAESNYYFRYHLETEVRDNEATKKTGKYYCIQSLKAFYNLNPIKVRVNCLGKFQLLDR

SEQ ID NO: 24049 - protein, 1244 aa, unidentified; identical to SEQ ID NO: 19679
  REGION 1..1244: note = Cas Enzyme sequence

SEQ ID NO: 24050 - protein, 1436 aa, unidentified
  REGION 1..1436: note = Cas Enzyme sequence
MKTVLGLDLGTNSIGWALVKEAEKESEQSEIIKLGVRVNPLTVDELQNFEKGKSITTNADRTLKRSMRRNLQRYKLRKENLIKILKENNFITDETILSENGNFTTFETYRLRAKAATEEITLEQFARVLLMINKKRGYKSSRKAKGSEDGVLIDGMEVAKILYNEHLTPGQYCLQQLQSGKKYLPDFYRSDLQQEFDRIFEKQMTFYPELLTKELQEELRGKKRDAVWAICLKAFKEKGIELVGTKRQGNTGEQKIENFVWRAKGLTDKLDLEQLVIVLQQINIQINNSSGYLGAISDRSKELFFNKITNPDGTVRAQTVGEYQMAILNNNPHASLRNMVFYRQDYLDEFNTIWEKQAAFHKELTTELKREIRDVVIFYQRPLKSQKSLISFCEFESRKIEVETDGKKKIKTVGSRVIPRSSPLFQEFKIWQILNNIEVFGKGRKNKKQKEKSLFSNIEDLLQNGGRRALYQEEKELLAEELSLRKELKKTDVLKLLFDNPKELDMNFNSIQGNLTQAALFEAYKQIIELSGHEIDIEKKSANEILKVVEEIFSALGFNTDILYFDSSKPLDKQPMYKLWHLLYSFEGDNSKTGNENLIDKITELYGFDKESAKILANVTFQDDYGSLSAKAIRKILPYLKAGNKYDVACQYAGYRHSASSLNREELNAKNYKDHLEILPKNSLRNPVVEKILNQMINVVNSIIDTYGKPDEIRIELARELKKNAKEREELSKSIAETTKLHEQYKAILSKPPFNLSYISHNDIVRYKLYEELKENGYKTLYSNTYISPANVFSGDFDIDHIIPQSRLFDDSFSNKTLELRSINIEKGNKTAYDFIKDKYGEVGGENSLDNYLIRIEDLYKKGILSRAKYNKLKMQEKDIPEGFINRDLADSQYIAKYAKTMLGELVKFVVSTTGSITDRLREDWQLVDVMKELNWEKYNSLGLTEEFMNEGGQRIRKIKDWTKRNDHRHHAMDALTVAFTKRQFIQYLNNLNARRINENHGISNTEKEEQDNVAIGAEDVPLSTRDVLGIERKYLYRDNKNKLRFVPPIPLDEFRAEAKRQLENTLISIKAKNKVTTKNINITKKKGGVNKKEQLTPRGQLHNETVYGSHKEYVVKEETVNAKFDSEKIATVANPAYRAALTERLQQFNNDPKKAFTGSNSLSKKPIWLDELHTKKVPEKVKTVSFEIVYTIRKDISPDLKVDKVIDKKIRQILENRLKEFGGNAKQAFSNLEENPIWLNKEKDISIKRVTIYGVNNVESLHDKKNKEGKLILDENGNKQPVDFVNTGNNHHVAIYRDAEGNLQEKVVSFFEAVNRRNLGLPVIDKNYKSDEGWEFLFSMKQNEYFVFPNEKTGFNPNEIDLLDPDNYSLISTNLFRVQKITTKDYTFRHHLETNVENNNLLKGITWIRTGLNGLSNVVKIRINHLGQIVSIGEY

SEQ ID NO: 24051 - protein, 1564 aa, unidentified
  REGION 1..1564: note = Cas Enzyme sequence
MKKILGLDLGTNSIGWALVEQDFEKKEGKILGMGSRIIPMTQDVLDTFSGGKPLETQTAARTSYRGIRRIRERHLLRRERLHRVLNVLGFLPEHYTNKIDFNKHFGQFVDESEPKLTYNNRDFIFKNSFEEMLSDFRQSQPQLFYTKPNGKETKIPYDWTIYYLRKKALRKKIAKEELAWIILNFNQKRGYYQLRGEEEEENPNKLVEFHSLKIVDVIADEKPNSKGELWYSLQLENGWVYRRSSKTPLFDWKGKIRDFIVTTDLNDDGTIKTDKEGNERRSFRAPSEDDWTLLKKKTEQEINKSDKTVGSYIYENLLQNPSQKIRGKLVRTIERKFYKDELIAILKKQIELQPELFTDDLYNDCVRELYRNNEAQQLVLSKHDFVHLFVEDIIFYQRPLRSQKSSIGNCSLEYRVHKDKDGNEVKEYLKAIPKSHPLYQEFRVWQWLSNLKIYRKEDDADVTTEFLKNTEDVVNLFEFLMAQKEVGHKDILKHLVTPALKEKFPNAKPAAFNKEVDREIARYRWNYVFDDSKEKEEDKSKKYPCNTTGYEIRRRLAKVENVPANFLTFEIELHLWHIIYSVTDKKEYEAALKSFANKYKLDENSFVEEFRKFPPFPSEYGAYSEKAIKKLLSLMRLGKYWSWDAIDPKTQSRIEKIISGEYVENIKTRVREKAINLTEYNHFQGLPIWLASYVIYDRHSEADNAGKWNSVDDLEQYLENFKQHSLRNPIVEQVVTETLRVVRDIWKQYGQVAKDFFSEIHIELGREMKNTADDRKYLTEQVANNEATNLRIKALLAELKENSDGKLPVENVRPFSPMQHEALRIYEDGVLSSSIELPEDIAKISKSSQPSKAELQRYKLWLEQKYRSPYTGSIIPLGRLFTEEYQIEHIIPKSRYFDDSFNNKVICESAVNQLKDKQLGWEFIKNHHGEKVECGMGKVVEIFTEEAYQAFVKEHYAKNKTKRQNLLLEDIPEKMIARQMNDTRYISKFISSLLSNIVRADEEDDGINSKNLIPGNGKITAVLKKDWGMDAVWNDLILPRFERMNQLTNTTAFTYWNEQYQKFLPVDYSPTDSKRIEKKRLDHRHHAMDALVIACMTRDHVQYLNNENAKSQKFHLQQGLARKLRRFEVVEISKMKKNEKGYWVKSNEKTEKEVPKEFFKPWDNFTIDAKTALEKVVVSFKQNLRVINKATNNYQKWVDKNGVKVKETVKQEGTNWAIRKPLHTPMPYGKKSYYFDLLKIAESVGKREYIIDNEIKAKVEKVLAECNGKITEAQKRLKQFPLTDNHGNPIIQTAFRINTEKFRRRQPISMLSNRGQGGIKTIEDAKKVIDKIVDYQIRMDLLKHIEECNEDLEKAFSAEGIENFNSKRKIPINKLPIGESGSGRFCVGNKISTKHKWVEADKGTNLYFAIYESEEGKRSYDTIPLNVVIERLKQGLSEVPNMNRKGDNLLLFLSPNDLVYVPTTEELENKHLINFSNFAKNQIERIYKVEKFSDKECYFIKFNIASLIKQYDAKSKFGELESQNKLQTTMCNERIKIIESCIKLSIDRLGNITFHGLSNLLSPE

SEQ ID NO: 24052 - protein, 1413 aa, unidentified
  REGION 1..1413: note = Cas Enzyme sequence
MNKGNTTVKRVLGLDLGTNSIGWALVEEHQIDKKVIDGSIIKLGVRVNPLTVDEKTNFEKGKPISTNADRTLKRGARRNLQRFKLRRENLIDVLRKHGFIDKETVLAENGKNSTHNLLNIRAKSAKEKVSLEEFARILLAINKKRGYKSSRKTKQEADGTAIDGMGVAKILYDENLTPGQYGLQLLENGKKYIPDFYRSDLQNEFDLIWEQQKRYYPEILNNELYQALQDKNKSQTWAICQEPFNIVGIKLTGKADEQKRQRFLFRTKGLNEKLELEHLAIALQEINNDKNKSSGYLGNISDRSKILYIDKITVGEFLYRQIERNPHTSLKNQVFYRQDYLDEFETIWETQAKFHSVLNPKLKEEIRDIVIFYQRKLKSQKGLISFCQFESWREERKDKNGNIIINKLTDKPKMRWAGARVIPKSSPLFQESKIWQGLRNLKFVNKTENEVIDFKKIDHEIRKVVFEELNLRGDLKPNEILDVLNPYYAIRKKSNWKCNLEKIEGNRTNKSLFNVYQLIAEREGYGFDWNKKTAKEIREELKAIFPSLGIKAEILDFNSHCEQYDKQASYQLWHLLYSAEEDDKITPEDREIYGNTDVKLRKVLHNRFGFKPEYTKLVSNISLSDDYGNLSTRALRKIMPFLQDGHDYYEACKLAGYNHSNSFTAEELAKRELKDRLELLTKNSLRNPVVEKILNQMINLINQVCDTYGKPDEIRIELARELKKTAKERADAQTFINKSTKANDEIRKIIEKDFGFKPTKSDVTRYKLWEELGKNGYKTIFTNTQIPKEKIFSKEVDIEHIIPKALLFDDSFSNKTLAYREINIKKGSRTAIDFITEDYHSELDEYHARVEDLYQSKAISKGKYKKMLMSAKNIPDGFIERDLRNSQYIAKKAKELLLEVFPTVVATSGRITDKLRKDWDLINIMKELSLPKYRALGLTEIEKRWDSGQEKEKEIEVIKDWTKRNDHRHHAMDALTVAFTTHNHIQYINYLNARRDEDHKKHSNIIAIENLITSKKEGKNGKTKRVYTPPMENFRQKAKKQIEEILISFKTKNKVVTNNINKAKGDHREENRKQKTPRGQLHKETVYGKSKRLAQKPLKLSKKTSLDQIDLMVNKEQKHVVLQHLHLFENNPQIAFDTKTLKKTPLLWKDEPLKDVSVYEEIFTIRKEIGPDLKIDKVVDEKIRIILKNRLSEFGNNAKKAFSDLEKNPIWLNKEKGIAIKRVTITGVSNAEALHYKKDHFGNAILDKNGQKQAVDFVSTGNNHHVAIYKDEKGNLQEKVVSFYEAVARVNENLPIIDKSFNQQKGWEFLFTMKQNEMFLFPSEDFDPTTIDLMNAKNSAQISKHLFRVQKIASKNYMFTHHLETQATTSQDLKSLKALIGKKYYFIQSTVGLKNIIKVRINHIGKIVQIGEY

SEQ ID NO: 24053 - protein, 1411 aa, unidentified
  REGION 1..1411: note = Cas Enzyme sequence
MDSKKTILGLDLGTNSIGWALVSETKENKKLIEADIIKLGVRVNPLSVDEKTNFEKGKPISTNADRTLKRSARRNLQRFKLRRENLKQVLSKHQIINDDFELAETGKDSTHQILEIRSKAASEEINLEDFARVLFAINKKRGYKSSRKAKQEKDGTVIDGMGVAKILYEENLTPGQYGYQLLKEGKKYIPDFYQSDLQNEFSLVWNTQKTYYNNILTDELFESLKDKNKSQTWAICKEPFNIVGIKLEGKANEQKLKKYKLRHYGLIEKLDLEHLAIVLQEINNDKNKSSGYLGAISDRSKILFMNKITVGQYLWNQKLKNFHTSLKNQVFYRQDYLDEFEKIWTTQAQFHSQLNNKLKEEIRDIIIFYQRKLKSQKGLLGFCQFESWKENRKDEDGNILVNKLTGNPKQRQVGHRVISKSSPLFQEYKIWQNINNLEFINKTTNEKEKPTLEEKQFLFTELNTKGELSENQVLKLFKYSNKEWRTNQPIVDHKKETRKPIEGNNTNKALFNAYQTIAEREGYGFDWNKKTATEIIEELNTIFPHLGIDKDILHFDANKELDKQLSYQLWHLLYSAEEDGKINQEDRLIYGNEDVNLRKTLHKKFGFAPEHAKLISNISLQDDYGSLSSRAIRKILPHLQDGLEYSEACVFAGYNHSNSKTREEIEKRVLKDRLDLLTKNSLRNPVVEKILNQMINLVNQICVTYGKPDEIRIELARELKKSAKEREDTLRFINAATRENDEIKKIILKDFGFKATKTDVVRYKLWLELDKNGHKTLFTDSYIPREKIFSKDIDIEHIIPKALLFDDSFSNKTLAYRKINLQKGSRTAYDFIKNDFASDFDAYQARVEDLYKSNSISKGKYKKLLMSASNVPQDFIERDLRNSQYIAKKAKEILQELVKEPIVSTSGSITDKLRKDWNLINVMKELNLPKYRALGLTEIETRWDSGQEKEKQHEVIKDWTKRNDHRHHAMDALTVAFTSYNHIQYINYLNARRDENHKKHGNILAIEKLITEQKKGKSGRSNRVFVPPMKNFRGEAKKHIESILISFKNKNKVATTNINITKTKHGLHQQKVKTPRGQLHKETIYGKSKRLMSKATKISKKMTLDQVQLISHPQKKSCVLNHLKEFDNNPQIAFDTKTSKKQPLLYKDEPLKEVLCFEEVYTIRKDITPELKIDKVFDEKIKAILKQRLAEFNNKPKEAFVDLEKNPIWLNEEKGIAIKRVTITGISNAEALHSKKDHSGNLVLNNNGKPQPADFVSTGNNHHVAIYKDDKGNLQEKVVSFYEAVSRENEGLPIIDKDYNSQNGWEFQFTMKQNEMFVFPSEDFNPSEIDLLDENNAALISKNLFRVQKISSKDYLFSNHLETKATSSEDLKKLKQLIGKKYYYIQTPKNLNGIVKVRINHIGKIVQVGEY

SEQ ID NO: 24054 - protein, 1395 aa, unidentified
  REGION 1..1395: note = Cas Enzyme sequence
MKKILGLDLGTNSIGWALVEIDHNKGIVRIIGMGSRILPMNATEINDFESKGKIKSSAALRTEKRGIRRLNERYLLRRDRLHLVLNLLDSLPEHYKLDINFTNSSNKKCGQFKSFKEPKLAYDTGKNEKGNFLFKDSYQEMLDEIGIENQKGKRIPYDWTLYYLRQKALSEKISLEELAWVLLSYNQKRGYEKIEVEDKSTKDNEIIEELDLHATHVERKIDNNGSTYYDITLDGAISFKYKEYTETQLTFVDDIKEVIKTSKVDTEGNIKDKEVEFTVVDIFNLQIADVKYQKEDGKHNFSIIYDNGWIEVKPPTKNFTNKYFSAKGKSYDYIVETKYTHLGEIKKTQGKERKFREPDFSDNSSDWTLLKKKTEKEALAFNYRKTGEAQKFISPKIYSVLKQDAQTGKRTKIIGGMFQVIDREFYRQELKQIINTQRRFHDTLRDKDIFEKCVRMLYPNNDSHAKSLLNNKEAIQHLLVEDILLYQRPLKSKKSEISNCKYEIRYWKETVDKSSGEIHYIPMYRKVASASHPLFQEYRIWDKIHSLKLIQLEQKDKDTGTIATNVDITNEYFNEEIYQELYEEFNKRKSINQNQFLNFCKKKFKIDYKSKNSNYVWNFPEDEELKGNQTRVSFVTRFKRCGFVDYENFLTKEKEVDLWHYLYSVNYKERIANDNKSIKTFFNGYFEGWDINEEVKNNIIKDFANYPKFSSQYCAFSEKSLKKFIPYLRMGSCIKTDYWANEDWFVQWKEQQEARKREILDKVKKIDFSSENINYDDVIEIAPKNNKLPFPKGLFNAFRDFSNITDFRKLNVSQASYLIYGRHSELAQAKHWNSPEDIRNELHKELKQHSMNNPVAEKVLLEMMQMVADIWEYHGDSKEHYFSEIHVEVGRELKKSAKEKDRDTKNQKNNREQNKRLRQVLEEFLCCEPYNANPKNKDHFERLKIIEDSALNLHQYKKKAERDEIDKILKNEITKETFEKYKLWIEQGCISPYTNKPIAMSDLFDGKKYNIDHIFPQASVTNNSLSNKVVCELEVNKEKSNKTGREFINNPGRREIYCSAHNEKVRVVSDEEYVATVLKQFSGSKKHILLSREIPKSFTNSQLNNARHISRKAMELLSHIVREEGELEFCSKNVLPVTGRITTDLKKAWQLNEVWTELVSPRFIRMNELTKSNLFGQIQLAKNGKEFFNCNVNKIIREEDESYDIKRIDHRHHALDALIVALCTREHVNYMNNINSKIHLKDIGKQKQLEAYRLTMKKNIKYSSPNKENPKDIDWYFMRPGEKRKPDANDSKENTVLKKDYYYGEIEYHGNWKTMVLDALQNTIVTFKQNLRVINTTVNRYKKDSTNNKSKQNTDNKQKYNWAIRRSLGKDTFYGKKTIEGSEKIVVRKKLDSSI

SEQ ID NO: 24055 - protein, 1394 aa, unidentified
  REGION 1..1394: note = Cas Enzyme sequence
MAKRILGLDLGITSIGSALVEEAENNTEESKIIKLGVRVTPLTVEEKTDFEKGRPLGTNRERTLKRSARRNLQRFKLRREALIDELIDHTIISKETPLTEIGKNSTHQTLYLRAKAAKERIELEDFARVLLSINKKRGYKSSRKARNEEEGVAIDGMSIAKELYENNLTPGEYVLDLLKQNKKYIPDFYKSDLHNEFDKIWEYQQKYHSEILSASLRKELQGKNKKQTWAICKTPFNLVGVTQKGTANEKRLERYLWRSMALNEKLALEYLAVVFQDINNDLNKSSDYLGAISDRSKELHFKHVTVGEYLYQQIQEAPHTSLKNQVFYRQDYMDEFEKIWSVQAQFHNELTLSLKEKIRDIIIFYQRKLKSQKGQLDFCQFESWEQAYVSDTTNKKMKRRIGRRVVSKSSPLFQEVKIWQVLNNLVFTNKQTGDQIVINDLDRNIIDEIFQELNLRGEHKATSVLKMLKKHIVLGKLTDWKANYEKIEGNTTHKALYEVFQKIAELEGYGFDWEKKTARAIKEELKAVFSEIGIVQEILEFDGNLQGKSFEMQASYRLWHLLYATEEDFTKVSREDQIIYGNSAISLKKKLVSIFGFKPEHTKMLASISFPQDYGNLSSKALKKILPELQKGYTFYDACKNVGYNHSNSFTKEELENRELKEKLELIKKNSLRNPVVEKILNQTVNVVNQIIDVYGKPDEIRIELARELKKSADERSKMTRNIAEATKRNLDIKKLIVKDFGIPNPTKNDVVRYRLYEELASNGYKTLFTNRKINREDIFSKKIDIEHIIPKALVFDDSFSNKTLAFREVNIEKANTTAFDFINNSNHSGIEDYKLRVESLFKDGNISPAKRKKLLTSKGDISDDFIERDLRNSQYIAKKAAAMLFEVFPKVVITSGSITDKLREDWGLINVMKELNLPKYRVLGLTEYEERLNKGTEKINRREVITNWTKRNDHRHHAMDALTVAFTTHNHIQYINNLSARKRTNHKKHKIILNIENLITETHNGKRKFKAPVPNFRTEAKKHIETILVSFKNKNKVATRNINITKTKTSDKQKKQLTPRGQLHKETIYGKIKRPSKKTIKLNKNFQVDQVAQIVNPEYKKIVLEHLKTFDNNPTIAFNSTTLKTHPLLCKNKPLKEVVCFEDVYTIRKGINPENFKTQKNIEKVIDTKIRQLLSQRLKDHENDAKKAFSNLKENPIWLDKEKGICVKRVRITGVSNAEALHTKKDHLGRELLNEQGAKQAVDFVSTGNNHHVAIYKDAKGNLQEKLVSFYEAVIRVNENLPIIDKAYKEKEGWQLLFTMKQNEMFVFPNDDFDVNEIDLMDTKNASRISPYLFRVQKIATKDYFFRHHLETTVDDNKNTKEIAWKRLGLNRIGGIKKVRLNHLGQIVQVGEY

SEQ ID NO: 24056 - protein, 1380 aa, unidentified
  REGION 1..1380: note = Cas Enzyme sequence
MKKILGLDLGTNSIGWALVYEAETKEEMSSIIKLGVRVNPLTVDEKQNFEKGKSITTNAERTSKRSMRRNLQRYKLRRENLIDVLKSNNFISDETILSENGNRTTFETYRLRAKAANEEISLEELGRVLLMINKKRGYKSSRKAKNQEEGQLIDGMDIAKKLYYDKITPGQLILQLLKAGGKNIPDFYRSDLQAEFDKIWEFQKSFYPEILVDDFKQQIGGKGKMNTSKIFLARFGIYTADNKGKDKKLQAGQWRVDSLSIQLPKSELAFVISDVNGSISNSSGYLGSISDRSKELFFNKQTVGQNLMSQLDEDPNTKLKNQVFYRQDYLDEFNIIWEKQAEFHSELTTELKKEVRDIVIFYQRHLKSQKGLVSFCEFESRPIELEIEGKKKVKIVGSKVCPRSSPIFQEFKIWQILNNIEVTDKASRIKRLLEQDEKESLFAELNLRTKMAKTDVLKHLFKNYRDLDLNYKDVEGNKTQAALFEAYAKIISLSGHNGFDFSELTSAQILERVHLIFEGLSYSTDILYFNAELEGKDFENQPIYQLWHLIYSFEGDDSKTGDEKLRNKLTSLYGFENEYAALLANLNFQSDYSNLSTKAIRKILPYLKAGHEYSIACEYAGYKHSKSSLTKEEIENKILKDKLDILPKNSLRNPVVEKILNQMINVVNSVVDSYGKPDEIRIELARELKKSAKEREELTTYIGQSTIEHDKYRKILQTEFGLTNVSRNDLIRYKLYLELEPKGFKTLYSDTYIPPSKLFSKEFDIEHIIPQSRLFDDSFSNKTLESRDVNIEKGNNTAYDYLHSKLGEGGLNEYLIRVDELYKFGKISKSKYNKLRMKGTDIPDDFIARDLRDTQYIARKAKSILEDLARRVTSTSGSITNRLREDWQLIDVMQELNWEKYNLMGMTEIIENREGQKIRRIKEWTKRNDHRHHAMDALTIAFTKTSFIQYLNNLNARSDKAGSIYGIEQKELYRDDKGKLKFKPPIPLEKFRAEAKKHLENTLISIKAKNKVSTSNINVTDKKGGNNKKKQLTPRGQLHLESVYGSISQYVSREEKVGSAFNEEKIATVSKRKYRDALLNRLIEYGKDPKEAFTGINSLDKNPIYLDALQTLKVPEKVKVVWMETVYTIRKEITPVLKLDKVIDVGIRNILQARLNDFGGNNKQAFSNLDENPIWLNEGKGISIKRVTITGVSNAIALHDKKDKEGNLILTSDGKNQGADFVNTGNNHHVAIYKDAKDKLQDNVVSFFEATSRVNLGLPIIDRDYYNDEGWEFKFSLKQNEYFVFPNEKTGFNPKDIDLLDADNYYLISPNLYRVQKFSKVIYGNAAVRDYVFRHHLESSIQDNKNMKDITYKSIKSLPIFDSIVKVRINHLGLIISTGE

SEQ ID NO: 24057 - protein, 1346 aa, unidentified
  REGION 1..1346: note = Cas Enzyme sequence
MKRILGLDLGTTSIGWAFINEAENKDEVSSIVNTGVRIVPLTTDEEADFKKGNTISINADRTLKRGARRGLQRFKQRRDALLQTFRGINFIYTNYVYAETGKHTTFSSYKLRAKSAVEKVSKEELVQVLLMLNKKRGYKSSRKAKTAEEGEAIDGMKIAKEIYENNQTPGQWVFNSLITGGKFIPDFYRSDLQKELEKIVRFQNQFHPAQISDKLLEDIQGKGRTATSLYFSKTLNIPLSENKGTKEETKLQHYTWRNEGLTNELDLKVLALIITEINNQINQSSGYLGAISDRSKELYFNQETVGQFQYKQLEKNVHSKLKNQVFYRQDYLDEFEKIWETQSKFHPELNEKLKSEVRDITIFFQRKLKSQKHLVSFCEFEKGHKAIPKSSPLFQEFRIWQNLNNVVVKNEASKEPLLLDEDLKKLIAQELLFKESMTDSQMLTFCELKKGTHTVNFKKIEGNRTNTSLFKAFEKILILEGYDELDLSKLNALDIKKIMKSAFFDLEINTAILDFNPTMQGDDFDKQPYYQLWHLLYSAEEDAVLKKSLTSKFGFKENHIPFLLNINLQADYGSLSAKAIKKVLPHLMDGHIYDKACTLVGYNHSSSLTTEQNNERVLKNTIELLKKNSLRNPVVEKILNQMINVINAIMEDPMMGKPDEIRVELARELKQNNEQRSDMTKAINKSTAEHDRIRKLLYSEFGIARVTRNDIIRYKLWLESDGISLYTGKPIELSRLFSKDYDIEHIIPKSRLFDDSFSNKTICERQLNIDKSNKTAYSFLQEKLSPEEFDQFEKRVKSLFGKISRTKQNKLLMADNEIPEGFIDRQLRETQYIAKKAKEILLEVSRNVTATIGSVTDKLREDWELIDVMQELNWDKYHKLGLTKEETGKNGERLYKIKDWTKRNDHRHHAMDAITIAFTKPAYIQYLNNLNARTNTDKKGNSIIGIENNYLKRDKNNKLRFIEPMPHFRAEAKKQLESILISYKAKNKVVTNNKNTTKKSGGTNQKIQLTPRGQLHKETVYGKLQQYATKEEKVSANFTEEYIQKVAKKEYREALLKRLLENGNDPKKAFTGKNTLNKMPIYISLKDNIVVPEKVKIVWMEDNYIIRKDITPDLKLDKVIDIGLKIMLQIRLDEFNGDAKKAFVNLDENPIWQNKEKGIAIKRVTISGVSNTQSLHTKKDHFGNEILDENENPIPVDFVSTGNNHHVAIYRDEKGNLQEEVVSFYDAVVRKNLGLSVINKTHQKGWEFLFTMKQNEYFVFPSNSFNPQETDLLNPENYHLISPNMFRVQKIASKNYYFRHHLETTTEEKKELKDVTYKSIWTTSPLTHVIKIRINHLGQIVQLGEY

SEQ ID NO: 24058 - protein, 1171 aa, unidentified
  REGION 1..1171: note = Cas Enzyme sequence
EALTAELFKEVEGKNKNQTWKICEKPFSIKGIKIDGSKADKKLETYKLRKLALSEKIGLEYLAIVLQDINSEINKSSGYLSEISDRSKELHFNNMTVGEYQYKQIAKNPHNSLKNQVFYRQDYLNEFQKIWEKQAEFYPELTNELRDKIQNEIIFYQRRLKSQKGLISYCEFESWEQEVIIDGEKKNKIVGHRVVPKSSPLFQEFKVWQNLNSVRITNVKTNEVYHIEEETNKELFQTLNWIDKLTDKQFLKELGLKPNEWKINFKTVEGNRTNYNLLKTYKEILRIEGYDNIDYSKIDAEDLIEILKKCFDEIGIDKGILEFTSTLKGNPFSKQESYELWHLLYSYEDDFTRTGTESLEQKLKSTFGFKDEHLHSLINISFQDDYGSLSARAIRKILPYLEDGKLYSEACELAGYNHSNSITKKQNEERELKPKLEILKKNSLRNPVVEKILNQCINVVNAIIEDSEMGRPDEIRIELARELKNTKEQRSEMTKAIGRATKDHEKYRDEIKSKFGLPHVSRNDLIRYKLYKELETNGYRTLYTDEYIKPEDLFSKKYDIEHIIPKSRLFDDSFSNKTLETRKSNLDKGDETALDFVGRKYGKEGLEKYRNRVEALYKSGKIKGSKHRKLLMGLKDIPEDFLNRDLGTSAYIAKKAAEILLDITRRVSLTSGKITSKLREDWGLIQVMQELNWDKYEKVGLTYYKENKEGKKLPRIKDWTKRNDHRHHAMDAITVAFTKPGIIQYLNNLNAKSNKEIYKLENAYTFKDERGKRKFIAPFPTIRKASKEQLSQILISFKTKNKVTTKNKNKINIEGNNKFKYQTVETPRGQLHKETVYGKSNYYETKLEKVGGKFDQDYIKLVANQSYRAALLTRLEEFENDAKKAFTGKNSLTKNPIYLNGTQETVPEKVKLAWLEEQFTIRKEVTPDLKIDKVVDEGVKKILKKRLKDFNNKPKEAFSDLDLNPIWLNKEKGIKIKRVKITGVSNAEPLHHSKNHFGVEMLDNNGSPFPNDYVSTGNNHHVAIYRDEKGNLQEEVVSFYEAVTRKNIGLPIINKQHEKGWQFLFTMKQNEMFVFPNEKIGFNPHEIDLLKPENNALISKNLFRVQKFSLIYYGNSAVRDYVFRHHLETQLLDLKATKDITWRALKSSSLLDKIVKIRINHLGNIVHVGEY

SEQ ID NO: 24059 - protein, 1449 aa, unidentified
  REGION 1..1449: note = Cas Enzyme sequence
MSELKKIVGLDVGTNSIGWAYVSLNLEARKGEIHDLGSRIIPMPADEISNFNQGNLESATSARTAKRGKRRLIERQLKRRERLVDVLKIYGMIPEEWNPNRYSSFAYNYTDGKAEFKFKQAYKEMKAIFESAHPDISVIPNDWTIYYLRKKALEYKISLEELAWVILQFNAKRGYYQLRGDDDLDTADNKFFISDIVDEIVDLDDEVRGKKKFRIVLRDGVEGEFSDKEKPEFIGKRIEFIATEKSTKEGDYISLTKPDGDDWTLRKKRTEHKIAESGKSLGAYIFDRILEEPGIKIRGKEVHTIDRKWYRKELEAILAAQIEFHPELKDEKTYEKAIQHLYNHNESHKKNLRKYGFGHLIATDIIYYQRPLKTKKYLIRNCKFEKYFFKDKNGELESRPVKVTARSNPYFQEFRVWSTLQNLRIIAEERRNEKGELVQDVDVSQEYLHAENIGKLFELFMLKKEVSETQILKELKLDKNAYRINFESQNKLPGNITISSILQPFSKEKKLKKEVLELVRNQNDLHKLWHIIYSLGEDESHMRSGIQTAFPDRLSKDAVDLLLQVPGFDKNYAAFSEKALKKLLPVMRMGKYFDEKEIHSSTKERIEKVINAEFDLSIKDEVREELMNRTEMHQFQGLPLHTASYLVYGRHSEAESDRRFEKPEDIDVDELIPQYSLRNPTAEQVIRETLLLVKKLWEVHGKPDEIHVEMARELKLPNDKRAKYTQRRDENYNTNQRAIAMLNELKADQPSINPHSKVHIETFKIFEEGAHANAGSTADTKIKAIRKKGDPTPKELEKYKLWLEQKYQSPYSEQVIPLSSLFTSSYEKEHVIPKTLFYDDSFNNKIICETELNGFKDNKTAYQMILDAGGTVQNGIRILEREKYEELTKKMYGQNKIKYKNLMRTEPPYDFAQRQLNNTRYISRKLYELLDPFVREEGEEAARSKNLMPMAGGITHELRNDWGLHHIWKKLLAPRFLRMNELTQTDEYYQKNGQRIDLSGYENELKRLDHRHHAVDALTVACTTRQHINYINSRRAENTRYNLRDVLFDKDENGKYQGYRLPWKGFPEEAERSLRQVVVSFKNRIRVINKTINYYQKYIEQADGSFKKKFVRQESNGANWAVRQPLSKETYKGKVILREYKPMSINSAVKDPHLIADPKIRKHMIRLLKKFEDKKSKVKKYLKEKPFQRDGKEIKKLQMIEYNTYATSTMDLDESTTQKHIDKIVDPNLQQELYDHLEKYGGDAELAFSTNGLIDFNSSRKLPVQNVRVKEKFGLKYPVGQTGNKQDKYVKSAKTNLFFNVYWNEKKQKREFETISLQEVVLHQMSVAHLSKKERRPVPIDTDKGEFLFYLSPHDLVYVPTKNQIDSYRPKNVELSTLSAERIYKSVSFSNTTALFLPQTVSSIIKDKKEFEAKNKMQKDILGNSIKNNCWKLQVDKLGRIKNIITGPA

SEQ ID NO: 24060 - protein, 1400 aa, unidentified
  REGION 1..1400: note = Cas Enzyme sequence
MSKILGLDLGTNSIGWAIRDTYLLDNQFEKYGVLTFKKGVGVEKSSEYSFAAERTKRRSIRRLYQARKYRLWATLEVLIVNGYCPLHIDELDKWRKYNKPNGRTYPNSKPFDNWIKLDFNQDDKQDYTSPYQLRKAALKRKLDKYELGRIFYHIAQRRRFKSSRKSGDKENTAVYSGSRESGAVGVNEIKDLIVQEGTLGAALAYIETAGNRVRNRYTLRKHYQEEIEKICESQKIERASDFFKEINQAIFFQRPLRSQKGLIGRCTLEPEKYRCPISHPSFEEFRAWAFLNNIKYKPSNELQLKWSELPLALKKEIYNDKFFRKSKDYFDFVEIEDFIKKKGYNWKFNYKSKTTVSGCTVSARLKELFGEDWNNLIINTGKKRIKRNKDKTEAEHPITYSILDIWHILFSFDDEEAITEFAKEGLKLEDEQIKLFHTAWKSLPDGYAMLSLHAINKILPFLKQGFIYTEAVLLANMPVTLGNEFWEQHGTEITSHISDLINDNRNQKQILNIVNSLIAKYKSLPDQDKYGVKNTDYQLDENDKKQIENLIIETYGDKSWESKSIDEQDKIVNDVTTKYRAFFADYNRDFKKLPHLLDTIKDFLHDNFGTDIQDLNKLYHPSQIEIYPKAKPDMEGKIFLGSPKTGAFKNPMAMRTLHELRKLVNYLIEIGEIDDETHVVVELSRELNDANRRWAIETWQKRKEEENQEFASAIAGLLNEYPQIQASDKQEDKEKFRLWYEQLPFKITYKKEPVKKDNDNDPRKHDWVNLSNQIINQVIQEKDLVKKYKLWKEQKCICLYTGQIINITDLFDENVIDFEHTIARSKSFDNSLSNLTVCYADFNRNTKKNQLPTSLSNYETEIKPRLRDWEDKVDAIKTNIEYWEKKSKRATDKEDKDNAIRQKHLWQFELEYWDNKLNRFKLEEITTGFKHSQITDTQLVSKYAFHYLKTVFNRVEVQKGSVTSDFRKIYGIQPKLEKKDRSKHSHHAIDAAVLTLIPTASKRDDVLKMTYEYSEKYRNKQYHENPYPGFKLSHIKEIEDNILINNITNDQTLTPAKKVVRKRGKVVYLENEGIKLKNKDGNFIPKIATGDAIRGQLHAETFFAAIKKVKRDELDNPLKDNNGNFLFEEELFFAVKEPLVYKANTQSPGFKTLDEIKSCIVDPHLFKIIEKQVGEKPLKEAFDEGIWMLNKSGEKVNKIRHVRIFVRDKKPLRIKKQTFASEKELINVASREHKEYYYAGNSSNILYGLYQDGKDRGFECLNLFDLVQVRRLTQIYSIKDYLPTTIKHARSKKEIPLHAILKEGQRVIFFESTLEEIKSLSKFEKLKRLYKVNRFFSSITGQIQFQHHSEARQDKELGYGGSSIDFNNLTPRYLLSPINFNFLIEGKDFEISPLGDIKIH

SEQ ID NO: 24061 - protein, 1416 aa, unidentified
  REGION 1..1416: note = Cas Enzyme sequence
MTKNILGLDLGVSSIGWALVQENSKNPENNKIVKLGVRVNPLTVDEQINFEKGKPITTNASRTLARSARRNLQRFKLRRANLIDVLKKGNILKQGDLLTEIGKNSTFQTQELRAKSAKEKVELSDFVRILLLINKKRGYKSSRKAKNEDEGQIIDGMAVAKKLYEENITPGEYSYKLLQEGRKQLPDFYRSDLQAEFDKIWNFQKQFNPEIFTNELYKRLQGKNRNATWKELEIPFYLVGIKQIGTMQEKKIERYFWRSEAVKKQLDFESLAVVFQEINSNLNNSSGYLGAISDRSKELYFNNQTVGEYLYNQLKINPHTKLKNQVFYRQDYLDEFEKIWETQAKYHKKLTKELKEEIRDIVIFYQRKLKSQKGLISFCEFENREIEITVNGKTKKKTVGLKVVPRSSPLFQEFKIWQRLNDLEFKNVETKEIFPLELEHKEILFGNLNIKGNLSSKELIEQLGYPSKEWKCNFKEIDGNKTNENLYTAFLKIIANEGIEFPKEFKLSIDDDIKVSKIDVSSEKIKEFIKENFLKLGINTSILDFNPELDGKDFEKQESYQLWHLLYSYEGDDSASGNEKLYELLEKKFGFKREYSKILADVGFSPDYGSLSSKAMRKIYPYIKENKYSEACHLAGYNHSKNSFTKEQLANRILKEQLEILPKNALRNPVVEKILNQMINLVNEVIKEYGKPDEIRIELARELKKNAEERANMTSDINKATLLHQKYAEVLQKEFGIKAPSRNDIIRYKLYLELANNGYKDLYTNQKIEKENIFTDKYDIDHIIPQSRFFDDSFSNKVLVPRRANQDKDNYTAVDYIEKKFGERGKEDFLNRIHLVFKSKEAIAGKSESQIFSMNTKFLKLQKKGSEIGEGFIERDLRDTQYIAKKAKEILFGITNSVVSTSGRITDKLREDWNLVNTMKELNLKKYRKLGLTELITNSKGEEKERIIDWTKRNDHRHHAMDALTVAFTTHSHIQYLNYLNARKDEKHKEHQNIFAIENTITEIVEKKNGSKERRFKLPIKNFRTDAKKQLEEVLISHKAKNKVVTKNINKIKKKGSIIAKTELTPRGQLHKETIYGSSKFLKTKEEKISGKFDLEMIQKVQNEKYRNALLKRLQEFDGDSKKAFTGKNVISKNPIFLNAEKTEQLPETVTLAWYETGYTIRKVVNPDNFKDFKNIEKVIDKGVRDILTERLKEFNGNSKEAFSDLEKNPIWLNKSKGISIKTVTITGINNAEALHYKKDHLGKEILDENGQRIAVDFVSTGNNHHVAIYEDENGNLQEKVVSFYEAVERVNQNLPIINKEYNSELGWKFLFTMKQNEMFLFPSDDFDPKEVDLFDDKYLSLISKNLFRVQSISIVQYGNSVIRDFKFRHHLETSVSDEKKLQGVTYQQIKSLQPLKDIIKIRLNNLGKIVQIGEY

SEQ ID NO: 24062 - protein, 1435 aa, unidentified
  REGION 1..1435: note = Cas Enzyme sequence
  REGION 1426..1433: note = misc_feature - Xaa can be any naturally occurring amino acid
MKRILGLDLGSSSIGWALVNEAESKNERSSIVKLGVRVNPLTVDESINFEKGKSITTNADRTLKRSMRRNLHRYKLRREALIEVLKECKFITEDTILSENGNRTTFETYRLRVKALTEEISLEEFARVLIMINKKRGYKSSRKAGGAEEDTLIDGMDIARKLYDANLTPGELCLQLLSAGKKVLPDFYRSDLQNELDRIWEKQKEYYPGILTAALKEELRGKKRDAVWAICANAFVWKETYTEWNNEESKNEQIEKEHKLEGIYSKRKRDEAKKENLQWRVSGLKEKLSLEQLVIILQEINTQINNSSGYLGTISDRSKELYFNKQTVGQYLMDILDNNPNASLRNIVFYRQDYLDEFNVLWEKQAEFHKELTGELKKEIRDIIIFYQRRLKSQKGLISFCEFESRQIEVKIDGKRKIRTVGNRVIPRSSPLFQEFKIWQILNNIEVTAVGNKNKQRMQNGSNEPDDTEQLELNGRRYLYQEEKELLAKELFVRDKMTKLDVLRLLFDNPEELDLNFKTIDGNKTGYLFFQAYSKMIEMSGHEPVDFKKPIEKIVEQVKSVFVLLNWNTDILSFDSNKELDKQSYYKLWHLLYSFEGDNTPTGNGCLVQKIMDSYGLGKEFAKILANITFQEDYGSLSAKAIHKILPHLKEGNQYDVACEYAGYRHSKSSLTKEEIANKVLKDKLEVLPRNSLRNPVVEKILNQMVNVINAIIEAYGRPDEIRVELARELKKNAKEREKLTKSIAETTKTHEAHKKLLQEEFGLKNVGRSDILRYKLYKELESRGYKTLYSNTYIPREKLFSKEFDIEHIIPQARLFDDSFSNKTLEARNVNIEKGNRTAYDFVKEKFGESGTDNSLDCYLNNIEVLFVSGKISKTKYTKLKMTEQDIPGGFIERDLRNTQYIAKKALSMLNEISRCVVATSGSITDKLREDWQLVDVMKELNWEKYKALGLVEYFEDKDGKQIGRIKDWSKRNDHRHHAMDALTVAFTKEVFIQYFNNKNASLNPNTNEYAIKNKYFQNGRAIAPIPLNEFRAEAKKHLENTLISIKAKNKVITNNINKTKKRGGVNTKKQQTPRGQLHLETIYGCCRQYLTKEEKVNASFDVSKIATVSSSVYRDALLKRLQEHHNDPKKAFAGRNSLDKKPVWLDKEQIRKVPEKVKTVTFETIYTIRKEISPDLRVDKIIDSGVRKMLTGRLKEYGNDAKKAFSNLDEKPIWLNKEKGIPIKRVTISGISNAQSLHVKKDKDGKPVLDGNGRNIPVDFVNTGNNHHVAVYRRPVIDKNGQMVIDENGNLKYELEEVVVTFFDAVTRVNLGQPIIDKDYKASEGWQFLFSMKQNEYFVFPNKKTGFNPKEIDLLDADNYGLISPNLFRVQKFTHKNYVFRHHLETTIKDTSSILRGITWIDFRSSKGLDSIVKVRVNHIGQIXXXXXXXXTN

SEQ ID NO: 24063 - protein, 973 aa, unidentified
  REGION 1..973: note = Cas Enzyme sequence
KCDISIEFLTKENEEALWHILYSVEDKNEIVKALQKFADKHDLNASFVDVFQKFPPFKKEYGSYSAKAIKKLLPLMRMGKYWSENSIDKGTRERIDKIITGEYDEKIENRVREKAIHLADVSDFKGLPLWLVCYIVYGRHSEAKEITQWKSPADIDSYLKSFKQHSLRNPIVEQIIIETLRVVRDIWKQVGNIDEIHVELGREMKNPADKRKKMTQQMSENENTNLRIKYLLTEFLNPEYEVENVRPYSPSQQDILRIYEEGVLNSVSDLPEEISDILKKFTETDLKKRPSRSEVLRYKLWLEQKYRSPYTGEVIPLGKLFTPAYEIEHVIPQSCYFDDSFSNKVICEAEVNKLKSNLLGHEFIVKHHGEIVELPFGKKVRIFTVDEYEQFVKDNYSRTRSKMKKLLMDDIPEEFVARQLNDSRYISKVVKSLLSNIVREKGEEEAISKNVIPCTGGVTDRLKKDWGINEVWNKIILPRFQRLNELTGTNKFTTKNVGIQEIPTMPLELQKGFNKKRIDHRHHAMDAIIIACANRNIINYLNNESATAKAELSRYDLQKMLCDKAKTDNNGNYKWVIRKPWASFTQDTYLALENIIVSFKQNLRVINKATNRFLHYNEEGKKIFVKQGKGDNWAIRKSMHKDTVFGEVNLRRIKTVALNEAMKNPQSIVVKDFKRKLLELWNLGFDAKRIKKYFEDNRETWSDINLSKIEVYYFSKDTKDRFFATRKPLDTSFDRKKIENNITDTGIQKILLRHLELKDNNPDIAFSPDGIDEMNRNIIQLNNGKYHQPIIKVRWYEQADKFAVGQTGNKFSKFVEAAKGTNLFFAVYESNILDKKTNTIIKKRNYATIPLNVAIERQKQGLPVAPEDENGNDPIFVLSPNDLVYLPTDDELANGIIAQPLDRGRIYKMVSCTGNEGHFIPARIANPILQTIELGSNNKAQKAWTDEMIKEICMPIKVDRLGNVLESSSSYKK

SEQ ID NO: 24064 - protein, 1154 aa, unidentified
  REGION 1..1154: note = Cas Enzyme sequence
MKNILGLDLGSSSIGWAVIRENSEEQELVAMGSRVVSLTAAELSSFTQGNGVSINSQRTQKRTQRKGYDRYQLRRTLLRNKLDTLGMLPDDSLSHLPKLQLWGLRAKAVTQRIELNELGRVLLHLNQKRGYKSIKSDFSGDKKITDYVKTVKTRYDELKEMRLTIGELFFRRLTENAFFRCKEQVYPRQAYVEEFDCIMNCQRKFYPDILTDETIRCIRDEIIYYQRPLKSCKYLVSRCEFEKRFYLNAAGKKTEAGPKVAPRTSPLFQVCRLWESINNIVVKDRRNEIVFISAEQRAALFDFLNTHEKLKGSDLLKLLGLSKTYGYRLGEQFKTGIQGNKTRVEIERALGNYPDKKRLLQFNLQEESSSMVNTETGEIIPMISLSFEQEPLYRLWHVLYSIDDREQLQSVLRQKFGIDDDEVLERLSAINLVKAGFGNKSSKAIRRILPFLQLGMNYAEACEAAGYTHSNNYTKAENEAHALLDRLPAIKKNELRQPVVEKILNQMVNVVNALMEKYGRFDEIRVELARELKQSKEERSNTYKSINKNQRENEQIAKRIVEYGVPTRSRIQKYKMWEESKHCCIYCGQPVDVGDFLRGFDVEVEHIIPKSLYFDDSFANKVCSCRSCNKEKNNRTAYDYMKSKGEKALSDYVERVNTMYTNNQISKTKLQNLLTPVDKISTDFIDRQLRESQYIARKAKEILTSVCYNVTATSGSVTSFLRHVWGWDTVLHDLNFDRYKKVGLTEVIEVNHRGSVIRREQIKDWSKRFDHRHHAIDALTIACTKQAYIQRLNNLRAEEGPDFNKMSLERYIQSQPHFSVAQVREAVDRILVSFRAGKRAVTPGKRYIRKNRKRISVQSVLIPRGALSEDSVYGVIHVWEKDEQGHVIQKQRAVMKYPITSINREMLDKGKVVDKRIHRILSDRLAQYNDNPKEAFAKPVYIDKECRIPIRTVRCFAKPAINTLVPLKKDDKGNPVAWGNPGNNHHVAIYRDEDGKYKERTVTFWEAVDRCRVGIPAIVTQPDTIWDNILQRNDISENVLESLPNVKWQFVLSLQQNEMFILGMNEEDYRYAMDQQDYALLNKYLYRVQKLSKGDYSFRYHTETSVEDKYDGKPNLKLSTQIGKLKRVRSLEALFNLHPHKVHISVLGEIKEIS

SEQ ID NO: 24065 - protein, 1436 aa, unidentified; identical to SEQ ID NO: 22947
  REGION 1..1436: note = Cas Enzyme sequence

SEQ ID NO: 24066 - protein, 1398 aa, unidentified
  REGION 1..1398: note = Cas Enzyme sequence
MKTILGLDLGTTSIGWALVKEAEPFSDEKSEIVRLGVRVIPLTVDERTSFENGKSITTNALRTQKRGMRRNLQRYKLRRQALIEELKSTGWIGNDFIFSETGPGSTFRTLRLRAKSASEEVTLGDLARILLQINKKRGYKSSRKMVSSDDGQAIDGMAVAKEMYDKGLTPGEYVYQRMLEGKYAIPEFYKSDLQEEFDRIWALQKSFHTELTDELYRKLSDRNKSQTWAICRDELGIQGLKSSFTGKERLKEAYRYRHLAATQEVNMEVLTCALQEINGQKASLSGLLSKISDRSKELYLNNLTVGQMLLKRIEDNPNNSLKNIVFYRQDYLDEFERIWTVQSKYHTELTHELKKRLRDIIIFYQRPLKSQKGLISLCELETKDIEVAIDGVKKMKNIGPRVCPRSSPLFQEFKIWQTINNIFVNGAALDDEDKSVIAKELMFKDKLKDSDLLKLLFKTTKGQSVNFKEVDGNRTMATLMKACFKIAENLGYDDIGLSKLSSEDQMVRIEGIFKEQGFKTGFLHFDSSLASPEFENQDSYRLWHLLYSYEGDKSASGNESLVKCIMDLCSMDEGSAKILASCTFLPDYGSLSAKAMRKILPYMKDGLEYTAACAMAGYRHSKRSLTKEELDTKEYSDRLSLLPKNTLRNPVVEKILNQMINVVNSVIDVYGKPDEIRIEMARELKKSAKEREEAQRDIASSTAESQKVIEILKGEPFFLQFPTRNDIIRYRLYQELAQNGFKTLYSNTYIPKDKLFSKEFDIEHIIPQALIFNDSFANKTLESRQCNLEKGKETAMDYVKSKYDETGVQAYCDRVNGLIGKGISKTKAKWLLMEGKDIPEDFINRELRDSQYIAKKAREILESLVKFVVPTTGSVTARLREDWQLVNVMQELNWEKYARLGLTGVREDKDGRRIPFIQDWTKRNDHRHHAMDALTIAFTRRQFIQYLNHLNSKIDVVSWDKKDLDLRDYDLEDIKFGNLSAGDRYGIVKALQDKFLYKDGNDKYRFVPPIPLDEFRRQAKEQLSDILISFKAKNKVCTRNVNVTKNKGGANRKTQLTPRGPLHNETIYGSSLEYVTKENEKIGSSFDTERITTVCKKKFRDALARRLEEFGGDPKKAFTGKNSPEKNPIWVDEHHSEQVPAKVRTVTMGQRFTGRKPIDATLKIEKVIDKRIREILQARLDEFDGKAAKAFSNLDENPIWLNKEKGIAIKRVTVSGPANPVPVRFKRDKDGKPIIDDAGKTIGADFVTPGNNHHIAIFRDSSGKLQEHPVSFLEATIAKSHGLDVIDRNYNKDEGWEFLFTLKQNEYFVFPNSETGFNPLDYDLTDPRNYAEISPNLYRVQKIATGDYYFRLHLETTVEDNKALKGITWKRVGPSGLEGAVKVRIDNLGRIVAVGEYD

SEQ ID NO: 24067 - protein, 1436 aa, unidentified
  REGION 1..1436: note = Cas Enzyme sequence
MKRILGLDLGTNSIGWALVNEAENKDERSSIVKLGVRVNPLTVDELTNFEKGKSITTNADRTLKRGMRRNLQRYKLRRETLTEVLKEHKLITEDTILSENGNRTTFETYRLRAKAVTEEISLEEFARVLLMINKKRGYKSSRKAKGVEEGTLIDGMDIARELYNNNLTPGELCLQLLDAGKKFLPDFYRSDLQNELDRIWEKQKEYYPEILTDVLKEELRAKKRDAVWAICAKYFVWKETYTEWNKEKGKTEQQEREHKLEGIYSKRKRDEAKRENLQWRVNGLKEKLSLEQLVIVFQEMNTQINNSSGYLGAISDRSKELYFNKQTVGQYQMEMLDKNPNASLRNMVFYRQDYLDEFNMLWEKQAVYHKELTEELKKEIRDIIIFYQRRLKSQKGLIGFCEFESRQIEVDIDGKKKIKTVGNRVISRSSPLFQEFKIWQILNNIEVTVVGKKRKRRKLKENYSALFEELNDAEQLELNGSRRLCQEEKELLAQELFVRDKMTKSEVLKLLFDNPQELDLNFKTIDGNKTGYALFQAYSKMIEMSGHEPVDFKKPVEKVVEYIKAVFDLLNWNTDILGFNSNEELDNQSYYKLWHLLYSFEGDNTPTGNGRLIQKMTELYGFEKEYATILANVSFQDDYGSLSAKAIHKILPHLKEGNRYDVACVYAGYRHSESSLTREEIANKVLKDRLMLLPKNSLHNPVVEKILNQMVNVINVIIDIYGKPDEIRVELARELKKNAKEREELTKSIAQTTKAHEEYKTLLQTEFGLTNVSRTDILRYKLYKELESCGYKTLYSNTYISREKLFSKEFDIEHIIPQARLFDDSFSNKTLEARSVNIEKGNKTAYDFVKEKFGESGADNSLEHYLNNIEDLFKSGKISKTKYNKLKMAEQDIPDGFIERDLRNTQYIAKKALSMLNEISHRVVATSGSVTDKLREDWQLIDVMKELNWEKYKALGLVEYFEDRDGRQIGRIKDWTKRNDHRHHAMDALTVAFTKDVFIQYFNNKNASLDPNANEHAIKNKYFQNGRAIAPMPLREFRAEAKKHLENTLISIKAKNKVITGNINKTRKKGGVNKNMQQTPRGQLHLETIYGSGKQYLTKEEKVNASFDMRKIETVSKSAYRDALLKRLYENDNDPKKAFAGKNSLDKQPIWLDKEQMRKVPEKVKIVTLEAIYTIRKEISPDLKVDKVIDVGVRKILIDRLNEYGNDAKKAFSNLDENPIWLNKEKGISIKRVTISGISNAQSLHVKKDKDGKPILDENGRNIPVDFVNTGNNHHVAVYYRPVIDKRGQLVVDEAGNPKYELEEVVVSFFEAVTRANLGQPIIDKDYKTTEGWQFLFSMKQNEYFVFPNEKIGFNPKEIDLLDVENYGLISPNLFRVQKFSLKNYVFRHHLETTIKDTSSILRGITWIDFRSSKGLDTIVKVRVNHIGQIVSVGEY

SEQ ID NO: 24068 - protein, 1498 aa, unidentified
  REGION 1..1498: note = Cas Enzyme sequence
MKHILGLDLGTNSIGWAVINAIKEENTQKEQLIGINTAGSRIIPMDAAQLGDFNKGNTVSQTANRTQFRGVRRLYERKKLRRERLHRILQLLGFLPKHYASQLDRYGKFIANSEPKLAWTTNTHEPSYFIFQSSFQEMLNDFLQNNNQVKKVPYDWTLFYLRKKALTQKIEKEELAWILLNFNQKRGYYQLREEETEKASSKTRQYFDSQIVTDITDTGQIYKGLKIFTITLENGEKGKFFSKNMPDWKGQKKDIIAIIDLDKNGNDKYDENGELSRRFKIPTEQEWEEQWELIKTKTQKDLDTSHKTVGAYIYDTLLQTPSQKIRGKLIRTIERKYYKDELNQILKKQEEFHPELRDSNLLEACIEELYPNNEAHRNAIAKYSISQLLIEDILFYQRPLKSKKSLISNCPYEEYTYTNKETGEICTSSLKCIAKSHPLFQEFRLWQFISNLRIYQKKGTINGKFTTDIDVTNQFLKTEDDYANLFDWLNQKKEIRQDTFLKKPAFGLKKNIANYRWNYVEDKTYPCNETHYKILSYWEKAGIEQSALTSEIEEKLWHILYSISDKNELRKALQHFADKNYLSDKFADTFQQIPPFEKDYGSYSAKAIKKLLPLMRIGRYWKAENFDSTTLDRIEKILTGEFEENIKNRTREKTIHLDNLYSFQGLPTWLACYIVYNRHSEIKDVTKWQQPSDIDAFLNAFKQHSLHNPIVEQIIMETLRTVRDIWKQTGHIDEIHVELGREMKNPAEKRRKLTQQIQENENTNLRIKALLTEFANPEFGIENVRPHSPSQQDLLRIYEEEVLNETKDIPEDIAVILKKFNEIDTKKRPSTSDVLRYKCWLEQKYRSPYTGAMIPLGKLFTPAYEIEHVIPQSRYFDDSFTNKVICEAEVNKLKGNMLGYEFIKNNQERIVELGFGQNVKIQTVEAYELFVKEHYSYNRTKMQKLLMEDIPDQFIERQLNDSRYISKLIKSLLSNIVRDEGEEEATSKNVIVCTGSITDRLKKDWGINDVWNKLILPRFIRLNEITESNRFTTTNACNKTIPAMPLDLQKGFNKKRIDHRHHAMDAIVIACANRNIVNYLNNESASKNAKISRQDLRQILCKKTKTDNLGNYQWLIDKPWDTFTQDMYSILSNIIVSFKQNLRIINKTTNHYIHYENGKKVNCSQKQSDSWAIRKPMHKETVYGEINLRRTTTATLKAALENPQRIIEKDLKKKIKELLTQGLNEKQIKKYFEDNKDIWQEINLKKIPVYYFTKETANRFFACRESINTTFNKKKIEEKVADTGIQQILLRHLEQNGNNPEQAFSPEGIEQMNKNIMSLNNGKFHQPIYKVRTYEQADKFAVGQTGNKSTKFVEAAKGTNLFFAIYETAHKRSFASIPLNVVIERLKKGLSPAPENEKGNLPKFILSPNDLVYVPTKEEIENGHINQPIQKDRIYKMVSCTGNQCFFIKSNVANTIIDKYEFSPLNKMERAITGEMIKETCIPIKTDRLGNIITSISL

SEQ ID NO: 24069 - protein, 1520 aa, unidentified
  REGION 1..1520: note = Cas Enzyme sequence
MKKIVGLDLGTNSIGWALINAYIDEYNKEHLYGIEACGSRIIPMDAAILGNFDKGNSISQTADRTSYRGIRRLRERHLLRRERLHRILDLLGFLPKHYSDSLNRYGKFLNDIECKLPWVKDETGSYKFIFQESFKEMLADFTEHHPKLIANNKKVPYDWTIYYLRKKALTQKISKEELAWILLNFNQKRGYYQLRGEEEETPNKLVEYYSLKVEKVEDSGEKKGKDTWYNVHLENGMIYRRTSNIPLDWEGKTKEFIVTTDLEADGSPKKDKEGNIKRSFRAPKDDDWTLIKKKTEADIDKIKMTVGAYIYDTLLQKPDQKIRGKLVRTIERKYYKNELYQILKTQSEFHEELRDKQLYIACLNELYPNNEPRRNSISTRDFCHLFIEDIIFYQRPLKSKKSLIDNCPYEENRYIDKESGEIKHASIKCIAKSHPLYQEFRLWQFIVNLRIYRKETDVDVTQELLPTEADYVTLFEWLNEKKEIDQKAFFKYPPFGFKKTTSNYRWNYVEDKPYPCNETHAQIIARLGKAHIPKAFLSKEKEETLWHILYSIEDKQEIEKALHSFANKNNLSEEFIEQFKNFPPFKKEYGSYSAKAIKKLLPLMRMGKYWSIENIDNGTRIRINKIIDGEYDENIRERVRQKAINLTDITHFRALPLWLACYLVYDRHSEVKDIVKWKTPKDIDLYLKSFKQHSLRNPIVEQVITETLRTVRDIWQQVGHIDEIHIELGREMKNPADKRARMSQQMIKNENTNLRIKALLTEFLNPEFGIENVRPYSPSQQDLLRIYEEGVLNSILELPEDIGIILGKFNQTDTLKRPTRSEILRYKLWLEQKYRSPYTGEMIPLSKLFTPAYEIEHIIPQSRYFDDSLSNKVICESEINKLKDRSLGYEFIKNHHGEKVELAFDKPVEVLSVEAYEKLVHESYSHNRSKMKKLLMEDIPDQFIERQLNDSRYISKVVKSLLSNIVREENEQEAISKNVIPCTGGITDRLKKDWGINDVWNKIVLPRFIRLNELTESTRFTSINTNNTMIPSMPLELQKGFNKKRIDHRHHAMDAIIIACANRNIVNYLNNVSASKNTKITRRDLQTLLCHKDKTDNNGNYKWVIDKPWETFTQDTLTALQKITVSFKQNLRVINKTTNHYQHYENGKKIVSNQSKGDSWAIRKSMHKETVHGEVNLRMIKTVSFNEALKKPQAIVEMDLKKKILAMLELGYDTKRIKNYFEENKDTWQDINPSKIKVYYFTKETKDRYFAVRKPIDTSFDKKKIKESITDTGIQQIMLRHLETKDNDPTLAFSPDGIDEMNRNILILNKGKKHQPIYKVRVYEKAEKFTVGQKGNKRTKFVEAAKGTNLFFAIYETEEIDKDTKKVIRKRSYSTIPLNVVIERQKQGLSSAPEDENGNLPKYILSPNDLVYVPTQEEINKGEVVMPIDRDRIYKMVDSSGITANFIPASTANLIFALPKATAEIYCNGENCIQNEYGIGSPQSKNQKAITGEMVKEICFPIKVDRLGNIIQVGLCILTN

SEQ ID NO: 24070 - protein, 1455 aa, unidentified; identical to SEQ ID NO: 22614
  REGION 1..1455: note = Cas Enzyme sequence

SEQ ID NO: 24071 - protein, 1182 aa, unidentified
  REGION 1..1182: note = Cas Enzyme sequence
MKKILGLDIGTASIGWAWVVEDEDEPEKSRIIAANVRIIPTGDEEKQYVEGKEVMLNRERTQRRGARRGIQRYKLRRRRLTDKLTELGMMPDRSMLTTMSAEELYGLRNRALTHKISLQEIGRIFYHLNQKRGYKSNRKTALKENQQETEYTGDIIARTVQLEKQKLTIGRYFHRRLLADAKVHDPNFRIKKTLFLREAYIKEFDAIWDRQQKYHPSILTEGNRKEIRDNIIYYQRRLKSQKGLVGNCRYEIHHKVAPKSSPLFQVFNLWQKLNNLVIENRDHEHVPIERSMKLKLVLQLEECESMSKTDVLKALGLIPTKHYSVNFDRLDGNKTRARIIKVLREGGLPEKTIGSMVQFDPLSGQLDKEPLYGLWHLLYSSEEPAKLIEKLMEKYAISRLTAEGLSEIKFTSEYGSLSSRAIRKLLPAMYEGMLYHDACKAVGYRHTDTRTKEEDETRELQDRINPIARNELRNPMVEKIGNQVAGLVNDILASKSYGRPDEIRVELARELKSNAKERAQNLERNRELEKINTAARNKLIEMGILKPSRSDIQKYRLWEETGNRSVYTGEMISFSDLFHSGRFDVDHIIPRALLFDDSYQNKAVIERSVNADKGNQTAYDYMKRQSDEKLANYVSIVNELYEREMITRAKRNRMLMTRQDIPEDFIERQLRETQYIAKEMHNRLQSVCRRVTTTTGSITSVLRNEWGLEDMMRQINIDSYRKQGRVVKEIDRATGKQREMILDWSKRDDHRNHAVDAIVIACTKPGMIRKLNTLNSTGSERDLPGTKAKQKDSWHIPVPWKGFRLQAEFAVRSILVSFSNRKRSVTWNKNLIRVQGEKRIAQLKKMGKEIIAKNGAHFLVQRTPTPRGSLHKETVYGQILQYKRVPLNKNFSAEQYVNLVHPHEARLVERHLTKYGNNIEDAMKAISKDPIYTDDTKTGRLDSVTVFQKSYVYRVPVQSLADKSKGNIDKVLSEVVDGHVRKMLRKHLEKFGFNAKLAFKDLENNPVWFDEERKIPIHTVRMIAHADDLVPLHHNDAGSPTDFVFTRNNHHSVIFKDQNGIVYERLVSFWEAVERARSGMPVIDRNPPPGHSFLYSMRINDMFVIGLDANGMDIFDAGNRQLVSRYLYRLQKISSCDYCFRHHIESKLDNEHALVRFQSLSALEKLFKVNINRLGEIVRVGE

SEQ ID NO: 24072 - protein, 1379 aa, unidentified
  REGION 1..1379: note = Cas Enzyme sequence
MKKILGLDLGTNSIGWALVNEAEIENEKSSIVKISVRVNPLTVDELTNFEKGKSITTNADRTLKRSMRRNLQRYKLRKENLIKILKQNGWINDQTILSENGNKSTFETYRLRARAVTEEISLEEFARILLMINRKRGYKSSRKAKSTDEGQLIDGMEVAKRLYNENITPGQLCYQLLKEGKKILPDFYRSDWQVEFERVFDKQLSFHPEFLSEGLKEELRNKKRDAVWAICAKAFKEKGFELVGTKRKGNAREQKIESYEWRAKAVTEKLDLEQIVIVLQQINIQINNSSGYLGTISDRSKELYFNKQTVGQYLMEQLAQNPHARLKNQVFYRQDYLDEFNTLWESQARFHSELTLELKNEIRDVVIFFQRHLKSQKGLINFCEFESKQIEIEVDGKKKMKTIGMKVCPKSSPLFQEFKVWQILNNIQVNDKSLHAKRFLEQEEKEILFSELSIREKLSKADALKILFKNHKELDLNYKEIEGNKTQAALFNAYNDIIELSGHEKIDFSKSPATEIVNSFTEVFTALGINTEILHFDSSVDGDKFDKQPMYQLWHLLYSYEGDNSPTGQDNLIKIIQERYGFETEYAKRMAGVTFQPDYGGLSTKAIRKILPHMKEGNEYSIACVHAGYKHSKSSLTTDELDKKELKDRLDILQKNSLRNPVVEKILNQMINVVNAVSESYGKPDEIRIELARELKKSTKEREELTTTINQTTAEHEKYRQELQQKFGFSHVSRNDIVRYKLYLELEPFGFKTLYSQTYISPDKLFSGDFDVEHIIPQSRLFDDSFSNKILETRSINLEKGNDTAIEFIEKKYCKEGLADYIARIDSVFKNNPAKQGKLRKLKMKGEDIPDDFINRDLRDTQYIAKKAKSILEEFVRDVVTTTGSITDRLREDWQLINVMQELNWNKYNKIGLTETIIGRDGQELPRIKDWTKRNDHRHHAMDALTIAFTKRSHIQYLNNLNARSDKAGSIYGIEQKELYRDDKGKLKFKPPIPLDEFRAEAKKQLENTLISIKAKNKVATININKTKKKEGTDKKIQLTPRGQLHLETVYGSMQQPVIKVEKIGGNFNEAMIAKVTKPIYREALLKRLQENGDDPKKAFTGKNSLEKNPIYLDELQTLKVPEKIKTKDVETIYTIRKDISPDLRIDKVIDKKIQKILQERLIEFNNDPKKAFTDLDLNPIWLNKEKGISIKRVTITGISNALALHDKKNKEGNLILDKDGKPQPVDFVNTGNNHHVAIYRDEKGNLQENVVSFFEATERVNQGLPVIDKEFKNKEGWEFLFSMKQNEYFVFPNTETGFNPSEVDLLNSDNCHLISPNLYRVQKFTIKDYFFRHHLETNVEMNNSLKGITWLRHGLNGIDGIVKVRINHIGQIVSTGEY

SEQ ID NO: 24073 - protein, 1497 aa, unidentified
  REGION 1..1497: note = Cas Enzyme sequence
MAKTFSLDLGTASIGYTIRNTDNGSELIGQLDNFGSIIFKKGVGNSQTGEFSYAAERTKHRSSRRLYQARRYRIWETLKVLIEYGFCPLSMEHLDKWRKYDKEKGLKRQYPIDALEFEQWVRLDFDGDDKPDYSSPYQLRSELATTQLDFTKEINKYKLGRALYHIAQRRGFKSSKGETLKEQEDIIKDISNPIELDITTLKKSEGIRSKDLMTYMSDHNMKTVGCALAKLENEEVRVRASIYQAVRSQYKEEVKYIFDFQNGLDINSDFFHKIYSDRKDGSIFYKRPLRSQKGLVGKCTLEPIKPRCPISHPEFEKFRAFSFINNIQYRSYTNDEWKDLTVEQKIKLYNERFLLTRSNFKFEEIRQWLEKEIGKPLSKEQKACDSTINYSDKTNVAGCPFTGRLKNLLGDNWRNFEYITSEKRKDKNGKEHTIVYSMEEIWHICFSFDDEELVTEFARTKLNYNDKQIKSFVNLWIAIPQGYSLLSLKAIRNINQFLEPKADNELYKGFIYTESALLGKIPEILGEDIWKENEKGILRSISSLINENREEKRILNIVNNLISAYKSLEHEEQFAYKNNEYQLDELDLKDIEMYTRDSFGENSWEKETQKNKNKILEQVADKYQQFFSTSRRDYFHLPKLGETLKTYLSNNFQTLHCDNNFVNPQNEDLPCRCDACKKLNKLYHPSMVEFYKPAKTDKDVGLKLLESPVIGAFKNPMAMRTLHQLRKLVNYFINEGIIDEETRIVVETARDLNDANMRWAIDKYQREREIENKEIAKAIKELRGEERNDDDIDKARLLIDQNPDYLFDKVRYDAEKEEEDSDNKKKKKFIGKTKDLQYKKDITKYKLWLEQGMECLYTGKIINISNLFDENATDFEHTIPRSQTFDNSLANLTICDYYYNRHIKKNRIPTQLENYDKETVINGQSYSAIKPRLEKWEQKVEQLKNNVEFWRYKSKQAQTKETKDNAIRQKNVWQMELDYWRDKLSRFTMTEVTSRFKHSQLNDTRLITKYAYHYLKSVFNKVEVQKGSVTADFRKMLGVQSVEEKKSRDKHSHHAIDAAVLSLIPVAAKRDKMLELFYKIQEENKLNRKTDVLEQELQKEIRTCQIRSVSNLAQYIDENILINHIVKNQTLTPAKRKARKKGRVVGIKDENGKYLLDDNGKKLPEHWLKGDCIRGQLHGDTFYGAITQGKKDEHGSLLRDENGKIISDEQILYVVRRELKFKKNDQDKGFKTLDELKISIVDKSLFKIIEKQCKGKTFKDACEEGFYMIDRKGNKVNRIRHIRCRTSIKNPLSIKNQTYLSDKEYKQTYYSENAENTLYALYWDGKNKEKGFECRNLFDVALILKTNNPKTTNDFFEPNKQIGRGNNKIDVPLYAVLKPEIKVVFFEKDKEELKELSNNELSKRIYKMNRIFSSEDGRIQFYHHLDARDDKKLLADYPEKTIWFDGKPTGKRQKNGFAKFSLNFVAPRLLLAPSNFNFIIEGKDFEMNLDGTMTFKY

SEQ ID NO: 24074 - protein, 1382 aa, unidentified
  REGION 1..1382: note = Cas Enzyme sequence
MKKILGLDLGTASIGWALVNEAEYDNEINSIIKAGVRVNPLSSDDQSNFEEGKSITLNAERTLKRSARRNLQRYKLRRDELIKILEEAGIIDSNLPLTEEGNFSTFKTYENRALAATERIDLYEFAKVLLMINKKRGYKSSRKVQNQDEGQLIDGMGVAIKLYEEGITPGHFVYSILKAGKKIIPDFYRSDLRDEFERIWNFQAEYYPDILTEEFKELVFGKSLKETSFHFREKFGLYTADNKGKDKRLQKYRWRCECVEQQMPIDVVAAVFCDVNSNINASSGYLGAISDRSKELYFNKQTIGQYLWGQIQNNSHMRLKGQVFYRQDYLDEFEVIWEQQAKHHPKLTNELKSVVRDVVIFYQRRLKSQKALLSFCEFESKEVVLSADGKMKKITFGARVCPKSSPIFQVFKIWSILNNIEVKDLESKTRFKLEIEQKQLLFDELNYLPKLSAKDALKLLFDKHSSSFELNYKDLEGNRTNAAILEKLYEIVNLSGHEITGYSKLNSANKVVAIMEILSSLGVNSNILDFNPLLEGEDFQKQPLYLLWHLLYSYEGDNSKTGNDSLLQALKDKYGFSSDFAVLLSNISFSDDYSDLSSKAIRKILPHLMDGLTYDKACLYAGYNHSKSLTADESKNRTLEPMLELLPKNSLRNPVVEKILNQMVNLINGVVNEYGKPDEIRIELARELKKSADERKRMTEAINKSKSEHEEYREILTKEFGLRYVSRNDLIRYKLYKELEFNGYKTLYTNTYISQDKLFSKEFDIEHIIPQARLFDDSFSNKTLEVRSANIEKGDATAYDYVYNKYGEEGLVRYKSVIDDLYRKDKISRTKRTKLLMTGDEIPNDFIERDLRDSQYIAKKAKQMLEKVFRTVTTTTGSITDKLREDWQLINVMQELNWERYNVLGLTYYEANNEGKPLPRISGWSKRDDHRHHTMDAITVAFTKRSHIQYLNNMNARSDRSSSIYGIEKKELFRDDKGKLRFKPPMPLETLRAEVKRHLEHTLVSIKAKNKVVTTNVNKTKKRKGHNTQIALTPRGQLHLETVYGKINRYKTTKVKVGGSFNYETIQGVANKKHREALLKRLSDFDNDTKKAFTGKNSPEKNPIYIDEHHSAQLPSRVKMVEFENVYTIRKEVSPDLNIDKVIDVKVKDRLKERLSEYGGDSKKAFTNLDENPIWLNESKGIKIKRVTISGISNAEALHEKRNKYGELVLDENGYPIPVDFVNTGNNHHVAIYADSKGDWHEKVVSLYEAVVRANQGLPAVDKLYNSHEGWSFQFSMKQNEYFIFPNESQGFYPKEIDLLNQDNYSTISPNLFRVQKFTNKDYFFRHHLETTVQRRDSKGKPIDEKPLKGVISKRINSLSALRGVVKVRINHLGIIVQVGEY

SEQ ID NO: 24075 - protein, 1388 aa, unidentified
  REGION 1..1388: note = Cas Enzyme sequence
MTRILGLDLGTTSIGWALVEEASDKIDSKIIKLGVRVNPLTTDEKINFEGGKPITTNADRTLKRGARRNLDRYQLRRDNLIEILIDKNFIEKDTPLTEIGKDTTHETLSLRAKAAHHEISLNDLSKILLTIIKKRGYKSSRKSKDENDGVAVDGMAIAKILYNESLTPGQYVYSLLQRDKKFIPDFYPSDLKAEFAAIWAVQKSYYPEILTYELYQSLQGKNKGQTWTICSKPFNIEGIKLLGSKREQKLERYKYRTEGLKTKLDLEILAIVLQEINNNINSTSGYLGKISDRSKVLYIDKITVGEYLFNQIKKNPHTSLKNQVFYRQDYLDEFEKLWEAQSKFHLELTSELKNEIRDVIIFYQRPLKSQKGLLSFCLFESWEQEYYDKALEKNRKRIIGQRVIPKSSPLFQEFKIWQNINDLEFKFVGDSNKINDEKTIYKLDDEDSSLLSSEANVRGNLSSINVLKLLGLNPKEWKINFEEIKGNTTNEKLFNIYQEIALREGYGADWKNQTAAQIVEELKAIFPQIGIDPSILDFDPNLKGNAFSKQSSYELWHLLYSAGDDSKITEEDKLIYGNSDVNLKKKLYEKYGFKPDYATLLTNLKLENDYGHLSARAIRKILPFLQEGLNYYEACNSVGYNHSNSLTKQENESRELKNKLEILSKNSLRNPVVEKILNQMVNVINQIIENYGKPDEIRIELARDLKKSAKERLETTKYINAATKVNLDIAKTIQKQFGFIPTRNDVVKYRLWLELAPLGHKSLFSNEQIKLGDLFSSKIDIEHILPKALIYDDSFSNKTLAYRHVNLKKGNRTAIDFITQDYNTDLDNYIERVESLYDKGKGALKKGKRDRLLKSAKDIKEGFIERDLRNSQYIAKKARTMLLEVFKNVTPTTGRITDKLREDWGIINVLKELNLPKYRELGLIEIEVRKNDKKIEKIKDWTKRNDHRHHAMDALAVAFTTHNHIQYINNLNARRDKTHEKHKVVQNIENLITHKVEDDKGNFKRKFVKPMPKFRQGAKKHLEFVLVSFKAKNKVVTTNINKTKKEAGKYNTQKTLTPRGQLHKETIYGKAKIPKSKATPLNKNFTLNEAQNIVHIGQRKKILNHLLDYENNSAIAFDTKTIKKTPIIWDGEPLKEVICFEDILTIRKDVTSDLKIDKVIDEGIKQLLLSRKKEFNGNAKEAFSDLEKNPIWQNKEKGIAIKRVTISGVNNAEALHYKKDHLGEFILNEKSEKIPVDYVSLGNNHHVAIYQDEKGKLQEKVVSLYEAVERVNQKLPIIDKEYNAYLGWEFMFTMKQNEMFVFPNEDFNPSEMDLMDDSNNELISKNLFRIQKIATKNYFFRHHLETELIDQKEARGMTWENIRSTEPLRKILKVRINHIGNIVQIGEY

SEQ ID NO: 24076 - protein, 1348 aa, unidentified
  REGION 1..1348: note = Cas Enzyme sequence
MKKILGLDLGTTSIGWAFINEAEGDDETSSIIHSGVRIVPLTTDEEADFKKGNTISINADRTLKRGARRGLQRFKQRRNALLQTFRGVNFINSNYVYAETGKQTTFSSYKLRAKSATEQISKEELVQVLLMLNKKRGYKSSRKAKSAEEGDAIDGMKIAKELNDKNQTPGQWVYNLLLNGGKFIPDFYRSDLQTEVEKIVRFQNQFYPEVINPKLHEDIQGKTRTATSQHFTTTLKIELSENKGTREETKLQHYKWRNDGLSSQLDIKVIAFVLTEINNQINQSSGYLGAISDRSKELYFNHETVGQFQYKQLQQNEHAKLKNQVFYRQDYLDEFEQIWETQSQFYTELNQKLKIEVRDITIFYQRKLKSQKHLVSFCEFEKGHKAIPKSSPLFQNFRIWQNLNNIIVKNETTKEPFQLDEDLKNLIAQELLFKESMTDTQMLTFCELKKGTHTVNFKKIEGNRTNTSLFNAFEKILILEGYDELDLSKLDSLDIKNIVKSAFSDLEINTAILDFDPTIQENDFDKQPYYQLWHLLYSAEEDEILKKSLMSKFGFKENHIPFLLNINLQADYGSLSARAIKKVLPHLMDGHIYDQACLLTGYNHSFSLTTEQNESRILKDHLGLLKKNSLRNPVVEKILNQMINVINAIIEDPTMGKPDEIRVELARELKANNEQRNEMTKAINNATKTHDDIRKLLTVEYGISRVTRNDIIRYKLWKETGGISLYTGKPIEASRLFTKDYDIEHIIPKSRLFDDSFSNKTICERTLNIEKSNKTAYSFLREKLTPEEFDQFEKRIKSMFGKISRTKQNKLMMADDQIPEGFIDRQLRETQYIAKKAKEVLLEVSRNVTATIGSVTDKLREDWELIEVMKELNWDKYHKLGLTKEEEGKNGERLYKIQDWTKRNDHRHHAMDAITVAFTKPAYIQYLNNLNARTNTDKKGNSIIGIENKYLKRDKNNKLRFIEPMPNFRSEAKKQLESILISYKAKNKVVTNNKNTTNKSGGTNQKIQLTPRGQLHKETVYGKLQQYATKEEKVNANFTQEYISKVAKKDYREALLKRLAENDNDPKKAFTGKNALAKTPIYISLKDNIVVPEKVKMVWLENNYTIRKDVTPDLKLEKVIDGGLKEILHNRLNEFNGDPKKAFVNLDENPIWQNKEKGIAIKRVTISGVSNAQALHTKKDHFGNEILDENKNPIPVDFVSTGNNHHVAIYRDDKGNLQEEVVSFYDAVVRKNLGLSVINKTHKNGWEFLFTMKQNEFFIFPSDSFDPQEIDLLNPENYHLISPNIFRVQKFGSLHSGFWFRHHLETQIEVPKILKGITFIVIQSSNNLKNIIKIRINHLGQIVQIGEY

SEQ ID NO: 24077 - protein, 1372 aa, unidentified
  REGION 1..1372: note = Cas Enzyme sequence
MKKILGLDLGTTSIGWAFVHEAENEQEKSTIINTGVRVVPLSTDEKINFNKLNAVTAAADRTASRGARRNLQRYKLRRQELLSILQGHGFISKNDILSENFENSTYFTWKIRAHAASDPISKKELAMVFLAINKKRGYKSSRKANNQEEGQLIDGIGIAKKLIEENLTPGQFNHKLKTEGSRYLPDYYKSDLHKEFEKIWKTQSIYYPEILTDTHLKELDGRTNKATAYYFEKVMLIERAENKGKEKKLQEYEWRSDAVKQQIPLEQIAYILTELNNDINKSSGYLSAISDRSKTLQFNNLTVGQHQYAKLFGMPLASQKNQVFYRQDYLDEFNTIWELQSKHHPELNDDLKVEIRDVIIFYQRRLKSQKGLISICELESRKRTTTVDGKTITKLTGPRVAPKSSPLFQSFRIWSNINNIVVTSKTDKKQIYQLDEETKKALFKELSWRSSMTDNQFLTWLFAGSKEKVGDYEIKYGKIEGNRTNEELLNAYLKITVLEGYDINTKQDKVDVVKDVRSCFKEFGIKDSLFHFKWDLQDTTMIATQDSYELWHLLYSYEDDSSNTGLDSLNNVLIEKYGFATNHTGIMSSVTFEKDHASLSARAMRKILPYLEDGMVYSDAATAAGYNHSRSVTKEENLKRELKDQLEILTKNSLRNPIVEKILNQMINVVNAILAEPSLGRPDEIRIELARELKQTAKQRSDATTQIAKATREHEEYREIIKKEFGLPYVSKRDLIKYKLYRELKSNGYKTLYSNTYIKPDELFSKKFDIEHIIPQSIRLDDSFSNKTLELRDINIEKGSQTAIDYCQRKGYEDRFIKTVQTLATVIDGISPRKMLKLFTKTEDVSTDFNERDKNNTGYISRKANEILIDVTRNVYATSGTITSMLRSDWELIDVLKELNWSKYDTLGLTYYETNKDGQKLPKIKDWSKRNDHRHHAMDAITVAFTKPALIQYINNKSAKSKGNIIISNIEEKFTYRDKDGKRRFVKPAPDIREQSKKALASILVSHKAKNKVVTDNINIIKIKGGTIKKKQSTPRGQLHLETVYGASKFYETKIETINASFDEQKINTVSNKQQREALLSRFRESGNDSKQAFTGKNALSKNPLKLSNGDELPLKVQTVALQTRYTIRKPINADNFKDEKTIAKIIDIGSRNIVLKRFLESGKNSKVAFSNLDKNPMWLNKEKGIALKRVTITGIQNTESLHIKKDIDGNTILDKNGKELPVDFVNTGNNHHVAIYKDEKGNYQEEIVTFYEAVARKNANLPIVNKIHEKGWKFLFTMKQNEIFLFSNDGFDVNNFDILNPNNAATLSAHLFRVQKIATKNYFFRHHLETELIDEQKLRGFTWENIRSTSPLKELIKVRINHLGKIVQINE

SEQ ID NO: 24078 - protein, 1560 aa, unidentified
  REGION 1..1560: note = Cas Enzyme sequence
MTKKILGLDLGTNSIGWALIAQYDETQDNEIIKLGSRIIPMSEDIMGKFDSGITESDTAARTGFRGIRRLRERHLLRRERLHRVLNILNFLPEHYAREIDFEKRLGQYIKEAEPKIAYRLNEDSKAFEFVFQQSFTEMVEDFKLYQPQLLEDGKKIPYDWTIYYLRKKALTKKIEKEELAWLLLNFNQKRGYYQLRGEEDEDATRTAQTRIYFITETIESIENTGILYKGLKIINVKLSNGEIGKYFNKEIPNWIGQRKNIIVTVDLDKNGNDRFEEDGITIKRKFSIPTDEDWEKKWKLIKIKTEKEIKDSKKTLGTYVYDTLLQNPKQKINGQLVRVIERKFYKDELKQILETQQKYHIQLQDKTLYTECLKELYEHNESHRKSNDDKDFANLFLNDIIFYQRPLKSKKSLISDCKFESRPMKDKVGKLQKDTNGKQVIKPIKCIAKSHPLFQEFRLWQWMKNLAIYEKATDLDVTSQFLQTEEDWVSLFEWLNDRKEVDHKALLNYLLKPLKLKVGNYRWNYVYDHIKDESKSYPCNETRSQILTRLAKVETIPVDFFTKETEQALWHILYSVNDKLEIPKALQSFATKHNLSEDFVEQFKKFPPFKSDYGSYSSKAIKKLLPLMRMGKYWSEADIHQQTKDRIEKIVSAEYDVAIQDRVRDKAINLKQIEDFRGLPLWLTSYIVYDRHSEEGQISNWKSVQDLENYLKEFKQHTLRNPIVEQVIIETLRVVKDIWNIYGNGVENFFDEIHIELGRQMKNPADKRKEMTNQINENENTNLRIKALLAEMMNDSSVENIRPYSQSQQEILRIYEDGVLSGEIEIPEDILKISKTAQPSKNDLIRYKLWLEQKYRSPYTGAIIPLNKLFTSAYEIEHIIPQSRHFDDSFSNKVICEMEVNKLKDNKLGLEFIKANYGQKVVLNLCDTVEIFTVDGYEKFVKEQYVKSRGKMKKLLLEEIPEKFIERQMNDTRYISKMVKNLLSNIVRAESKDEGSTSINVLSSNGQITSTLKQDWGLNDVWNEIIAPRFERLNIITNSNNFGSINEKTNKFLPTVPLELSKGFTKKRLDHRHHALDALVIACATRNHINYLNNQSALEKGNKENKQQKREDLRNKLCIKKYNEGSEKNYKWMFKKPWKTFTIEAKEHLFTTLVSFKQNLRVINKTVNKYERWENNNGIVEKVMATQTKGDSWAIRKPMHKNTISGLVRLRFKKVVMLNAALDNWDSIVDNNLRKHIKNLVEVKYDKKMLQKYFKDRKNIWNEKDISKVEIYYWDKENVASRVKLDDSFTKIKIETITDTGIQKILLTHVNKEKHQTAKDEKGKEISPETIAFSADGIDELNKNITELNRGKFHQPIYKIRIYEPKGNKFNIGQTGNKKDKFVVTADGTNLFFAIYKDEKGNRIYETIPLNIITENQKQGALQNLHPNQCSVPQTNEAGNNLLFFLSPNDLVYLPTDEEKENSNLVKLDDLNQQQINRVYKFIDGSGTTANFIPNYSATTIFNMNKKEQEKKGLNYPIQNEFGVGSPQSKNQKSLTGIMIKEFCWKLQVNRVGEIIKISR

SEQ ID NO: 24079 - protein, 1348 aa, unidentified
  REGION 1..1348: note = Cas Enzyme sequence
MKKILGLDLGTTSIGWAFINEAEGDDETSSIIHSGVRIVPLTTDEEADFKKGNTISINADRTLKRGARRGLQRFKQRRNALLQTFRGVNFINSNYVYAETGKQTTFSSYKLRAKSATEQISKEELVQVLLMLNKKRGYKSSRKAKSAEEGDAIDGMKIAKELNDKNQTPGQWVYNLLLNGGKFIPDFYRSDLQTEVEKIVRFQNQFYPEVINPKLHEDIQGKTRTATSQHFTTTLKIELSENKGTREETKLQHYKWRNDGLSSQLDIKVIAFVLTEINNQINQSSGYLGAISDRSKELYFNHETVGQFQYKQLQQNEHAKLKNQVFYRQDYLDEFEQIWETQSQFYTELNQKLKIEVRDITIFYQRKLKSQKHLVSFCEFEKGHKAIPKSSPLFQDFRIWQNLNNIIVKNETTKEPFQLDDDLKNLIAQELLFKESMTDTQMLTFCELKKGTHTVNFKKIEGNRTNTSLFNAFEKILILEGYDELDLSKLDSLDIKNIVKSAFSDLEINTAILDFDPTIQENDFDKQPYYQLWHLLYSAEEDEILKKSLMSKFGFKENHIPFLLNINLQADYGSLSARAIKKVLPHLMDGHIYDQACLLTGYNHSSSLTTEQNESRILKDHLGLLKKNSLRNPVVEKILNQMINVINAIIEDPTMGKPDEIRVELARELKANNEQRNEMTKAINNATKTHDDIRKLLTVEYGISRVTRNDIIRYKLWKETGGISLYTGKPIEASRLFTKDYDIEHIIPKSRLFDDSFSNKTICERTLNIEKSNKTAYSFLREKLTPEEFDQFEKRIKSMFGKISRTKQNKLMMADDQIPEGFIDRQLRETQYIAKKAKEVLLEISRNVTATIGSVTDKLREDWELIEVMKELNWDKYHKLGLTKEEEGKNGERLYKIQDWTKRNDHRHHAMDAITVAFTKPAYIQYLNNLNARTNTDKKGNSIIGIENKYLKRDKNNKLRFIEPMPNFRSEAKKQLESILISYKAKNKVVTNNKNTTNKSGGTNQKIQLTPRGQLHKETVYGKLQQYATKEEKVNANFTQEYISKVAKKDYREALLKRLAENDNDPKKAFTGKNALAKTPIYISLKDNIVVPEKVKMVWLENNYTIRKDVTPDLKLEKVIDGGLKEILHNRLNEFNGDPKKAFVNLDENPIWQNKEKGIAIKRVTISGVSNAQALHTKKDHFGNEILDENKNPIPVDFVSTGNNHHVAIYRDDKGNLQEEVVSFYDAVVRKNLGLSVINKTHKNGWEFLFTMKQNEFFIFPSDSFDPQEIDLLNPENYHLISPNIFRVQKFGSLHSGFWFRHHLETQIEVPKILKGITFIVIQSSNNLKNIIKIRINHLGQIVQIGEY

SEQ ID NO: 24080 - protein, 1531 aa, unidentified
  REGION 1..1531: note = Cas Enzyme sequence
MENKKIILGLDLGTNSIGWALIEQNINEKVGNIISAGSRIIPLEGYVSTSTGGASKDPYNDFISGNGISKAHARTKFRSTRKLYERQHQRRERLHRTLNILGFLPAHYAKFIDFEKQLGQFIPETEPKLAYQLNEETNKAEFIFKESFAEMLADFAKHQPSLVEGGRKIPYDWTIYYLRKKALLNKIKKEELAWLLLNFNQKRGYYQLRGEDDEDASITAKTRKYFTTQKIKAITDTGIIWKGLKVLIVTLADNSAGKIFKKEIPDWVGQERNIIATVDLDKDGNDKIEESGILSQRFTIPTEEEWDKEWKLVKIKTENEILNSHKTVGAYIYNTLLQKPNQKIKGKLVRVIERKFYKAELEAILSKQIEFHPELKDAPLYQACLEELYEHNDAHKGSIAQKGFTHLFLNDIIFYQRPLKSKKSLISNCKFETRSFIRDGKKEIETLKCIAKSHPLFQEFRLWQFVQNIRIYQREKEINGRLQTDVNVTDEFLKSDEDWVNLFDWLNNRKEIDQKAFLKYPAFNLKKNAEKYRWNYVEEKVYPCNETRSQIVYRLDKVENVPEGFLSRANEEALWHILYSVDDKNEIQKALKRFADKKGLGDDFVEQFRKFPPFKKEYGAFSAKAIKKMLPLMRLGNYWNEQEIDAKTKARIDKIISGEFDDTIRNRVREKAIHLNNVTDFKGLPQWLVSYIIYDRHSEDGEVIKWKTANDIELLVQHSLRNPVVEQVINETLQVVRDIWKQHGNNEENFFNEIHVELGREMKNPADKRKQLTNQISENENTNLRIKALLAELLNSGDVENVRPYSPMQQEILKIYEEGVLNAVDTIPEDILKITKLAQPTSAELTRYKLWLQQKYRSPYTGQIIPLNKLFTASYEIEHNIPQSRYFDDSFSNKVICETEVNKDKDNSTGYEYIKNNSGKKIELSLGKEVTLFTVDQYEDFVKNNYSKSRGKMKRLLMDEIPEGFIQRQLNDTRYISKVVKNLLSNIVREKGEQETISKNVIASNGTITSVLKQDWGLNDVWNEIITPRFERLNELTNSKNFGEWANKEGKKVFQTQMPTEFQKGFSKKRIDHRHHALDAIVIACATRNHINYLNNESALGKDKQEIKEKKRYDLKQTLCFKKYNDDAKRNYKWVFHKPWEIYTQEVKEVLDGIVVSFKQNLRVINKSVNYYQVIKKDSDGGISKELVKQSKGENWAIRKPMHKDTVSGLVQLRFKKTVSISAALDNWKMIVDKELKNKIKELVDKNWDKKKLVKFFKDQDNKFSGKNISKIEVYYWDRENVASRVKIDESFDTSKIESITDTSIQKIMLNHLAKYSEEKNGKLLHHPEIAFSSDGVDDLNKNIIELNGGRPHQPIYKVRTFEPKGNKFNVGTTGNKKDKYVEAAKGTNLFFAIYIDESGKRNYDTIPLNIVIERQKQGLTPVPEKNELGHQLQFYLSPNDLIYLISQEDKHNNISVDFTDMPKEQMRMIYKVVSFTGNRLSAIPYTVAQPIIDKVEFTQLNKLEFSLEKLSIKDSCIKLKVDRLGNISRG

SEQ ID NO: 24081 - protein, 1231 aa, unidentified
  REGION 1..1231: note = Cas Enzyme sequence
LLHIEINVYFQNSKMLTMKKILGLDLGSTSIGWAFVSEDEDRSEILRMGVRLVPYTGDEQDEFSKGRAISLNKQRTLARTARKTNHRYKLRKKALTEELTALGMMPEDGLMKSIDPVTLYGIRAKAASQQVTLPELGRILFLLNQKRGYRSTRSGPEDEGGKKLSDYLTELRERKELLDRENLTIGQYFFSEYQRDRWFQTRKKVFPRECYIREFDTIWRTQQAFYPTILTDEIRDRLRDNIIYYQRRLKSQKHLVGECRYEKHHKVAPRSSPLFQFEKIWESINSISIRDKANEPFYLSLGQKQKIFEHLISNDKLSATELLKMVGLNWRQGWTANEQIRKAGIQGDTTRSRFRKAFAKAGIKDTQQWILFDIIETRLETNEDTGEIIEHLSIRSDFENQPLYALWHLLYSVDEPERLIPALMRKYGFSQETAEILSGIDFKKDGFGNKSARAIRKLMPGLLKGMVYSDAAEHVGYNHSDSITTAENLNRELKDALERYPRNALRQPVVEKILNQLVNLVNGILQDENLGRPDEIRVELARELRQSREERERTYKRNNEADRTHKDISARLNEEFPGLSVTRKVIEKYKLYEQQGKRCLYSGQTLTLSQVLLGEGVDVDHIIPQSKLFDDSFQNKALVLRVENGLKDNATAFDYMSSKSKEEFEYFLERVNQLFDEGMITRAKRDRLLMKEADIPEDFINRQLNETRYISRESMRLLKQICRNVYATSGSVTEFLRNEWGYNEVLKQLNRPIYEAVGKVTDGKIDGWSKRDDHRHHAIDALIVACTRQSFIQQLNTLNSRITREYLNQVVKERSVEGWQARRSLLEEYIRTQRPFPTETVKHAVAGILISQKPGKKVATISRNIVRGKTQLTLTPRGQLHKEQVYGRIRRYAEKKTPLNGRFTDTERIANPKLRQLVADRLAAFDNNPKKAFKDLDKNPIWIDEAQTKVLTEVTLWEEFFVFRYNLDMNFKEKDIKHIIDRQVREKVQERFDARAGQKDHPLKNLAQDPIWLNQEKGIRITSVRCFTGLNDLVPLHVVVEGNTGTSRFMPAEAKPVDFVSTRNNHHIALYESPDGKWQECVVSLWEAVERKKLGIPVIVQKPSDVWDDVLNKGIENQGLLNGLPKPDWRFITSLQQNEMFVFGMDIADLNNVIEKNEYFLLSRNIYRVQKLSQSDYNFRQQYETRLERDTDEAREKSQMKKIIRVKSLEKYKYLNPIKVKVDTLGRISLA

SEQ ID NO: 24082 - protein, 1531 aa, unidentified
  REGION 1..1531: note = Cas Enzyme sequence
MENKKIILGLDLGTNSIGWALIEQNINEKVGNIISAGSRIIPLEGYVSTSTGGASKDPYNDFISGNGISKAHARTKFRSTRKLYERQHQRRERLHRTLNILGFLPAHYAKFIDFEKQLGQFIPETEPKLAYQLNEETNKAEFIFKESFAEMLADFAKHQPSLVEGGRKIPYDWTIYYLRKKALLNKIKKEELAWLLLNFNQKRGYYQLRGEDDEDASITAKTRKYFTTQKIKAITDTGIIWKGLKVLIVTLADNSAGKIFKKEIPDWVGQERNIIATVDLDKDGNDKIEESGILSQRFTIPTEEEWDKEWKLVKIKTENEILNSHKTVGAYIYNTLLQKPNQKIKGKLVRVIERKFYKAELEAILSKQIEFHPELKDAPLYQACLEELYEHNDAHKGSIAQKGFTHLFLNDIIFYQRPLKSKKSLISNCKFETRSFIRDGKKEIETLKCIAKSHPLFQEFRLWQFVQNIRIYQREKEINGRLQTDVNVTDEFLKSDEDWVNLFDWLNNRKEIDQKAFLKYPAFNLKKNAEKYRWNYVEEKVYPCNETRSQIVYRLDKVENVPEGFLSRANEEALWHILYSVDDKNEIQKALKRFADKKGLGDDFVEQFRKFPPFKKEYGAFSAKAIKKMLPLMRLGNYWNEQEIDAKTKARIDKIISGEFDDTIRNRVREKAIHLNNVTDFKGLPQWLVSYIIYDRHSEDGEVIKWKTANDIELLEQHSLRNPVVEQVINETLQVVRDIWKQHGNNEENFFNEIHVELGREMKNPADKRKQLTNQISENENTNLRIKALLAELLNSGDVENVRPYSPMQQEILKIYEEGVLNAVDTIPEDILKITKLAQPTSAELTRYKLWLQQKYRSPYTGQIIPLNKLFTASYEIEHNIPQSRYFDDSFSNKVICETEVNKDKDNSTGYEYIKNNSGKKIELSLGKEVTLFTVDQYEDFVKNNYSKSRGKMKRLLMDEIPEGFIQRQLNDTRYISKVVKNLLSNIVREKGEQETISKNVIASNGTITSVLKQDWGLNDVWNEIITPRFERLNELTNSKNFGEWANKEGKKVFQTQMPTEFQKGFSKKRIDHRHHALDAIVIACATRNHINYLNNESALGKDKQEIKEKKRYDLKQTLCFKKYNDDAKRNYKWVFHKPWEIYTQEVKEVLDGIVVSFKQNLRVINKSVNYYQVIKKDSDGGISKELVKQSKGENWAIRKPMHKDTVSGLVQLRFKKTVSISAALDNWKMIVDKELKNKIKELVDKNWDKKKLVKFFKDQDNKFSGKNISKIEVYYWDRENVASRVKIDESFDTSKIESITDTSIQKIMLNHLAKYSEEKNGKLLHHPEIAFSSDGVDDLNKNIIELNGGRPHQPIYKVRTFEPKGNKFNVGTTGNKKDKYVEAAKGTNLFFAIYIDESGKRNYDTIPLNIVIERQKQGLTPVPEKNELGHQLQFYLSPNDLIYLISQEDKHNNISVDFTDMPKEQMRMIYKVVSFTGNRLSAIPYTVAQPIIDKVEFTQLNKLEFSLEKLSIKDSCIKLKVDRLGNISRG

SEQ ID NO: 24083 - protein, 1242 aa, unidentified
  REGION 1..1242: note = Cas Enzyme sequence
MFSQRKNPYCDLLRFEINVYFSNPKQLTMKKILGLDLGSTSIGWAFITEDVERSEILRLGVRLIPYTGDEQDEFSKGRAISLNKQRTHARTARKTNHRYKLRKKALTDELSALGMMPGEGLMLAVDPVTLYGLRARAASEQVTLTELGRILFLLNQKRGYRSTRSGAEDDGGKKLSDYLTELRERKELLERENLTIGQYFFSEYQRDRWFQTRKKVFPRECYIQEFDTIWRTQQPFYPGILTDATREKLRDTIIYYQRRLKSQKHLVGECRFEKHHKVTPRSSPLFQYEKIWESINSISIRNKANEPYDLNLEQKQKVFDHLISHDKLNLSDLMKIVGLNWRQGWTANEQIRKAGLQGDTTRNPLRKALSKAGIKDTQEWLRFDILETRIETNTDTGEVTEHLAIRSDFEKEPLYVLWHLLYSVDEPERLIPALMRKFGFSKETADILSDIDFKKDGFGNKSARAIRKLLPGLLKGMVYSEAAEHVGYNHSDSITTEENLSRELKNALERYPRNALRQPVVEKILNQLVNLVNGILQDETLGRPDEIRVELARELRQSREEREKTYKRNNESDRAHQEIVARLTQEFPGLSVTRKVIEKYKLYEQQGKRCMYSGQTLTLAQVLLGEGVDVDHIIPQSKLFDDSFQNKVLALRVENALKDNETAFDYMSSRSKDELDDFLERVNLLFADGMITRAKRDRLLMKEHDIPEDFINRQLNETRYISRESMRLLKQVSRNVFATSGSVTDFLRSQWGYNEVLKQLNRPVYEAVGMVTDGKIEGWSKRDDHRHHAIDALIVACTRQSFIQQLNTLNSRITREHLNQVVKTRMSNGWQARKSLLEQYIQTQQPFHTDTVKQVVAGILISQKPGKKVVTVSRNVVRGKTQLTLTPRGQLHKEQVYGRIRRYSEKKTPLNGRFTDTERIANPHIRKIVADRLAAYGNDPKKAFKDLDKNPLWTDAAHSKALTEVTLWEDFFVFRYSLDMSFKEKDIKHIIDKQVREKVQERFDERAGHKEHPLKNLTQDPIWLNREKGIRITSVRCFTGLNDLVPLHGTLDGKTGTPKTITPLARPVDFVSTRNNHHIALYESPEGKWQECVVTLWQAVERKKVGLPVIVENPSAVWDMILSKGFENQDLLKGLPQPEWRFITSLQQNEMFVFGMEKSQLIAVLNMSKFPEVSKRLYRVQKLSTRDYYFRHQYETRLEKNPEEGGQFASLGKMMRIKNLSKLATLNPIKVRIDTLGRIFLA

SEQ ID NO: 24084 - protein, 1280 aa, unidentified
  REGION 1..1280: note = Cas Enzyme sequence
MNKTILGLDLGTNSIGWALVEVDAENMPIKVLGMGSRIIPLNTDDKDEFSKGKSISKNRERTTKRTQRKGYDRKQLRKAELKQILLQYNMYPDDDLIQIDSIDLWKLRNDAADETKDISPQQLGRILYMLNQKRGYKSARSDANQDAKDTKYVEEVKSRYAELKITDQTIGQYFYHELANAKTNNQYFRVKEKVYPREAYIEEFDRIMNIQKLKHNFLTDELINEIKEKVIFYQRKLKSQKSLVSICELERFPVKYFDNETNDEKTTISGPKVAPKSSPLAQLCKIWETVNTINFKVKNPPESKYKWSDAELNLDEKKAIVNYLLTHEKMTFKEFLKIINKEDGEVFCNSQIKKGLQGNLTFAEISKTISNSELLRFEPNTVQKNNPKLYVDTESGDVIEIDNLIVNKDFVHEPLYRLWHIIYSIKDTSECEAALIKNFNLTAQQAKTLANIDFNKSAYSNKSSKAMRKILPYLMQGHVYSKARVMAGYNHSNSKTKEQQESTTPDEKLELLPKNSLRQPVVEKILNQMIQVVNTIIDTYGKPSHIRVELTRELKQSKDERARTEKLNSDNEKINAEVVMRLQSLGILATNKFIQKYKFIMQVRGEVDDKGKVASYSLKNAQVTNQCIYCGKSFGLKEALTGDGYDVDHIVPKDLLFDDSQTNKVLVHRSCNSQKLNRTAYDYIASKSKEELDNYLLRVDDWYKRGIISYSKMLRLKVSYDDYLERKTKGKATEADKKLWENFIDRQLRQTQYISRKSVAILSKICNKVHVTEGTVTAKLRRLWGWEDVLLHLQLPKYKNLNMTETKEWTSDHGKHKHSKEEIKNWTKRDDHRHQALDALVVACTQQGFIQRINTLSASDTKDLMNEAIKNAKKNGGELFNEDIFNENNEDAKKYKEKLTKLEQYLISKRPENFTTKYVENQLANVLISYKPGKKVATKGVRKIRVDGNKRVVQDKGIIVPRGALHEQQIYGKIKVAIKNVPIATLFEHANNIVSEKIKAKVLERIKSHNNDIKAAIKSLKKEPLYADEAKLKLIVSGTMYKEEIVFRYPVESIVFKDLPYILDDKVRAIISQRLKDYNNDPKKAFQNLEENPIWFNKEKGLKITSVRCITGLSNMTALHTDENGKAKDFVKLGNNHHFSIFADEKDNYYDKITTFWEAVERKKQGLELINKSHEDGYHFKFSLQQNQMFVYKLNPSEVDFLDPKNKALISEHLYRVQKISKKSSGQIDIVFRHHLETAIYDSKEAANSERFIIIQSLGKLKTFTKVHINYLGEITKVGE

SEQ ID NO: 24085 - protein, 1522 aa, unidentified
  REGION 1..1522: note = Cas Enzyme sequence
MKRILGLDLGTNSIGWALVEQDFENKQGQILGMGSRIIPMSQDILGDFGKGNSVSQTAVRTGYRGVRRLRERHLLRRERLHRVLNILNFLPIHYAKQIDFAKRFGQFVEDTEPKLAWKKNGKDNFEFLFLKSFDEMVDEFEANEQAIKIPYDWTIYYLRKKALTHKIKKEELAWIILNFNQKRGYYQLRGEEQEENTNKLVEFHSLKVDDVKADDEPNKKGEIWYSLKLENDWIYRRSSKTDLSDWKDKVKDFIVTTDLNEDGSVKTNKDGEEKRSFRSPKEDDWTLIKKKTESDIDNHIKNYKINNGVEGTIGTYIFENLLKNPNQKIRGKLVRTIERKFYKEELEQILQKQKELQPELFKDDLYNECVRELYKSNEAHQMQLNKRDFLHLFLNDIIFYQRPLKSQKSTIGNCSLEFSRFKDKEGIELTIYLKAIPKSNPYYQEFRVWQWLYNLKIYTRDDDKDVTTQFIKGVNDLENLFEFLMSRKEVNHIDILSYFIEPIVKEKFPNAKGRAFKNEVSKEIKKYRWNYVYDADKDESKDYPMNETGYELRRRLEKVEKVPENFLSKEIELRLWHIIYSVTDKIEFEKALKTFAIKYNLDKNSFVENFIRFKPYPSDYGTYSEKALKKLLPLMRIGKYWNWNAIDTKTKNRIGNIITGEFDEAIRDRVREKSIRLTEENHFQGLQLWLAQYIVYDRHSEANISGKWHSVSDLDNYLKEFKQHSLRNPIVEQVITETLRVVKDIWKQYGNGVKDYFDEIHIELGRDMKNPADKRKKMTNIISENENTNIRIKTILAELINDSRFENVRPYSPIQQEALKIYEDGVLNSGIEIPDEIDKISKKSELTKSEINRYKLWLEQKYKSPYTGRPIPMSKLFTTAYEIEHIIPQSRYFDDSFSNKVICEAEVNSLKDKQLGLEFIKNHFGEKVKTSFGEVEIFSEEAYKAFVKEHYDKNWSKKNKLLLAEIPEKMIERQLNDTRYISRFISQVLSNIVRIDDYKAKKIIANAEFLANKETDNKITEKIREKAKSEANDDGINSKNIIPGNGKITGILKQDWGLNDVWNDLILPRFERINELTKSNEFTAWSEKHQKFLPTVPLKLSKGFQKKRIDHRHHALDALVIACATRNHVNLLNNKHAKSEVRFDLQHKLRKTEKWKDNSGKERNKFTDFKKPWKNFTIDTKNELEKIVVSYKQNLRVINKATNYYEKIINGKKEKVEQKGVNWAIRKPMHEETVSGVVNLPWVKLGKGEITTATRERNDLVSLFKDIKTKDQAESKVSKITDTGIQKIVINYLASKDNNPELAFSPEGIEDMNKNIDQFNEGKFHYPIFKVRTYEKGKGRFVLGTNGNKKSKYVQGAPNLFFGIYINNHEQAEGKDKKQIIRSFETIPLNIVIERLKQELEPVPETNELGEKLLFHLSPDDLVYVPSEDEKENINGIDFNNLSKEQKERIFYVNDFSGSTCYFRPNRIAKAITAKEVDLSFNEKKNKLSGSFDTKTATLEGLQIKDICIKLKVDRLGNISKV

SEQ ID NO: 24086 - protein, 1327 aa, unidentified
  REGION 1..1327: note = Cas Enzyme sequence
YRRPSNIFLDWEGKTKEFIVTTDLDVDGNPKLDKEGEIKRSFRAPKDDDWTLLKKKTEADIDQSNKTVGAFIYDALLNKPNQKIRGKLIRTIERKFYKSELNAILEKQKEYHPELSDNKLFRQCIEELYLNNISHRRGIEDKSFTYLFVDDIIFYQRPLKSKKSLIANCPFESYNYVEKETGEKKTDPIKCIPKSHPLYQEFRLWQFVLNLRIYQKERLVEKGNKDIDSNGVLKARTKEKLETDVDVTSEFLKDEQDYLALFEWLNDRKEIDQKAFFKYPAFGLKKNASDYRWNYVEDKPYPCNETRSLILNRWEKAGIARESLTTEIEESLWHILYSVKDKHELEKALNSFVSKNGLNDDFTENFKKFPPFKNDYGAYSAKALKKIVPLMRIGDKWTEEAIDKNTRARIEKLINGEFDEKIRNRVREKSIKLTDINHFKGLPVWLASYIVYDRHSEAKDITKWHEPADIDKYLNTFRQHSLRNPIVEKVILETLRTVRDIWHKAGQIDEIHVELGREMKNPADKRARMTKQITENENTNLRIKALLMELINPEFEVENVRPYSPSQQDILKLYEEYALNSNERYDATLRKFVPEPELPAFVDEIIQKFKENDVKKQPSRSEILRYKLWLEQRYRSPYTGEMIPLGKLFTSAYEIEHIIPQARYFDDSFSNKVICEAEINNLKGDELGYEFIKNNAGRKVELSFGKTVEVLSVEAYEKFIRDNYSRLRGKKKKLLMEEIPDKFIERQLNDSRYISNEVKKLLSNIVRTKDVNGEYEQETVSKNLISVTGSITDRLKKDWGLNDVWNSIVIPRFERLNEVTGTKDFTTTNQNGHPIPAMPLELQKGFSKKRIDHRHHAMDALVVACATRDHVNLLNNEAAMAKNNANRYQLSRKLRRYEKTVVIRNGEKKEIEVAKEFLKPWQSFTYDAHAFLCKIIVSFKQNLRVINKTTNKYESYYDANGKLNTGKNGLPIKQLMAQSTGDSWGIRKPMHKDTVFGKVNLRKIRDVKLSVAIQNPTIIVNSDLKEKIKELLLKGFDQKLMNNYFKENKDIWSDVNLNKISTYYFSNETNDKFYATRKLLDQSFNKAKIESSVTDTGIQKILLRHLEQNQNNAEIAFSPDGIDELNRNIVKLNNGKFHQPIYKVRCYEKADKYSIGNFGNKKAKYVEAAKGTNLYFAIYWNEAKQKREFETIPLNITIEHQKLVAHLPKTERTPVPVNKEKGIFLFVLSPNDLVYVPTQEEMENPSLFDKDRLTADQVNRLYKMVSSSGSQCFFIQNHVSNTIVNKVEFSALNKMEKTIDGLMVKEICWKLNVDRLGYIVSAMNGQR

SEQ ID NO: 24087 - protein, 1608 aa, unidentified
  REGION 1..1608: note = Cas Enzyme sequence
MKKILGLDLGTNSIGWALIEQDFGTNQGKILGLGSRIIPMSQDILGDFGKGNSVSQTAERTRYRSMRRLRERCLLRRERLHRVLNVLGFLPEHYAKDIDFENRLGKFKEETETKLPWRKGEDGKMSFLFNESFNEMVAEFKASGQDVKIPYDWTIYFLRKKALSRKISKEELAWLILNFNQKRGYYQLRGEEEESNIYIKEFVKPLKAIKIEKGEVDKKNDKKSWYTITFSNNWTYSATFSSEPNWIDTERDFLVTEEYDEYGNIKIVKDKRTDITGREKRKITPLPTFDEINLMSKEQQDRIFKKIKTRTEVTISNSGKTVGTYIYETLLQKPTQKIRGKLVRTIERKFYKDELKAILEKQIELQPELFTDEMYTACVRELYKSNEAHQLELGKRDFVHLFLEDIIFYQRPLRSQKSSISNCTLEYRYYKQKDKNGKEVEVKEYLKAIPKSNPFYQEFRVWQWLHNLKIYSKSDDTDFTAVFLKSTEDWESLFEFLMLKKEVNHTDILNHLITPIVKEKYPDAKPKALKSEILKEIAKYRWNYVFDDSKEKEEEKSKKYPMNETGYEIRRLLDKVENVPANFLTRNIEQELWHIIYSVKDPIEYETALKSFAKRNNLEVNSFAEEFKKFKPFKSEFGTYSEKAIKKLLPLMRIGKYWDDNYIPKTIRNRVNAISERLKTIKEEKEIEKIADDDIPKQILKSFFGLVELTKGLKLYQASYLVYGRHSEGISNERWGMSQDIQEYLYRFKQHELRNPIVEQVITETLRTVKDIWEYYAESNNIPYEMVYDEHKKKKVRSYPNFFNEIHVELGREMKNTADDRKRMSSQISSNENTNQRIKLLLMELKNDNSIEEVRPFSPIQQDILKIYEEGALGRYSEQELKNEAFENAGKDEAKNVYEVSRKAYPTKNELIRYKLWLEQKYCSPYTGQPIPLSKLFSTNYEIEHIIPQSRYFDDSLSNKVICESAINPKPYKDNQLGLEFIKNQGGRIIEELSTNGKLVRLLTEDEYRKFVEEHYSNNKVKRNKLLLEEIPEKMIARQMNDTRFISKYVMQVLSNIVRDEKTGSNDDGVNSKNIIPCNGQITNRLKQDWGLNDIWNELILPRFERMNELTNRTDFTATNREGHTIPAIPFEYSKGFSKKRIDHRHHAMDALAIACATREHVNLLNNEHAKSDKQRLDLRSKLCYKKYNDNSKQDYKWIFKKPWGTNEYQSLIKSSVEFPVDAKNELEKIVVSFKQNLRVINKATNNYQKFENGKKIVVEQKGVNWAIRKSLHTPMPYGRKVYEYDVLKIAENVGRRALIIDDEIRAKVESSFKANGSKITDTQKFLKKQPVKDEKGNHIIATPFKINSEKYRRRQPILELANRGKGGIKTIDDATNYINKVADVNLRKDLLSHLKSCNNDIESAFSAEGLDNFNLKRKIPVYSLPITESGSGRFPVGNRIGTRHKFVEADKGTNLFYAVYMNEDGKRSYETIPLHIVIERQKQYLNSVPERNENGEKLVSYLSPYDLVFLPTEEEQVNINSIDFRNLSKMQLKRIFVVNDFSGYTCYFRPNHFANNIAPKEVDLSFDILKNKLSGSFDSKTTNFQGRPIKEFFIKLKVDRLGNISKA

SEQ ID NO: 24088 - protein, 1232 aa, unidentified
  REGION 1..1232: note = Cas Enzyme sequence
MKKILGLDLGSTSIGWALINEGDEGNEILGMGCRIIPYSENEAGDFKQGTGESKNHQRTIKRTQRKGYDRYQLRRHALRLTLEQFGLKPNSCHFNLTALSLYGLRAKAIEEKIELAEIGRILFHFNQRRGYKHGVKEESGDKKQREFVEKINNRYEQIKERYSIGQYFTKELEKDPLFRIKDKVFPRHAYISEFNQIWAFQQQFYPEILTNELGARLRDEIIYYQRPLKSQKGLVSICEFEGFLTANGKTNNGKLVFAGPKVAPRSSPLFQVCKIWESINNISITTINQDTNKYEKIKLDLDQKMKLFQYLDEHENLSEKKLFEILELEMGQKYFTNAMIKKRGIQGNLTKATLIKALKGHPNLKDLMKMELEVESYDLVDKTTGELIVRQRITPLIEADEIYQLWHVLYSGQKERNYNLLKAKFNINNEYAEKLFEIDFTKGGYGNKSVKAMRHILPYLMQGFVYSDACLMAGYRHSDSLTTDERSRKILKDKLDLLPKNSLRQPVVEKILNQMINVVNAIIENYGRPDEIRVELARELKQSKQERNEYYNNASARDRQNKRIAERLGNEYGVKGNKRNIEKWRLFHEVGGRCLYCNKQLTITQLLRGVEADIEHIIPRSLYFDDSFSNKTISHVECNKAKGQSTAFDFMNGKPDDQFQDYINRVAELSHSPGNQIDDGAQCVVNKLNRTKFQRLMMERKDIPQDFISRQLRETQYIARKAREILEQVALNVYATSGTVTERLRHLWGWDNILMQLQLPKYRSIGLTEFIESQNGSGTENNERIIGWNKRMDNRHHAIDALTIACTKQGFIQRINTLNSEHTRQEIFAEIKDVEFKEKLTALEKYLILKRPFPTYEVENQVSKVLISFKSGKKVATIGVRKRKVDGSLKTVQTGVIIPRGALSEESVYGKIKVTSNAPLKKLFEAPELIVSQRVKDLITKRLIEHGRDIKKAVSSCKAKPIFLESSQIPLEFAKVFREEVVIKYPISSLKAKDLPSVVDPNVRDAIESRLKQFDFNEKTAFKDIENNPVWCDEKNKIPIKSVRCFTGLSSVVPLKTWEDGSVKGYVKPGNNHHIAIYIDENGNKHEHIVTFWHAVERKKYGFPVVIHNPVDAWSIALNTEELPQSFMKQLPLDTWRYILSFQQNEMYFMGLKEEELQRAIREKEYSFLSQKLYRVQKIGASDYTFRHHLETMIDDSLGAIKTGRFLRIRSIGTLDSYSPIKAKINRVGKLL

SEQ ID NO: 24089 - protein, 1490 aa, unidentified
  REGION 1..1490: note = Cas Enzyme sequence
MKKLGLDMGSSSLGWVITENGKIVKKGVVTFDTGMVKDQSGGYVSPTRERREVRSKRNLIRARKYRKWELLEVLVENDLVPLGIGELEMWSKYKKGQTRKFPENEQFLQWLACNFTYDEGVNYKHPYELRVKALDQKLSKYEFGRALYHLVQRRGYKDIGETDRETEKQIARRDESGFQKALDENRTIAEALVKEFLNNNERARNQYPYRDEYHNELELICKGQGYDISKDEEGNYNNKFVAELWKTIIWQRPLKSQKGNIGKCTLEPKKLRCSLSHPIFEIFRTWQFINTIKFYDEDGNKQSLEQKHRNELFEWFLKKDSNFKFEEIKTFLNKKFEKPKRYNYPISKDKNGKEIYDTSVAGMPVCKNLIDIFGDDVRQALATIENYNKGNVSEKGGGGNAPKIIKNYSAYDLWHAIFNFDEKFLEKFAVEKLGIENVTRKRKGEDVSISPLVELKSRFLQGYADLSLKAMCKIIPFLKQGYLYNEAVILAKMPELLGENWEMQKEIIIKAAKEANNIYEWNKTINEIVNKLIDKYKGLSDSEQFAFKNFEYQLDNDDVIDIIKTCESKFGEKSWTKREDKDEIINAVKDKYQEFFKDETRSYSNLKTLTDTFDELLRVLEINIDADELYHHSNLENKYLKKCKTNNGTEKPELPKARNKNGFEVDILPAAIIDSIKNPMFNKSMSILRKLINELIKDDTIDNETEVVIELARELNDNNKRIAIERYQNERKNNREKYREFLKEYSVKENCNINIEKSIPTFELWTEQTFAETIDDIGNKIINKDRQEILREKNALKRYELWLEQKGQCIYTGRMIGITTLFSTAIDIMHTIPRSLLPDDTMANITVGYASYNRDLQKQKLPKECANYNKDVEGWGTNMIPRLKNWEEIRDRYKKQYEDRLKAKGNEDENTKNKRIQEKHYFKLHYDYWKDKLERFEADEVTDKWARRQLTDTQMVGKYAREFLKTYFMKVSVQKGTVTAAFRKIFGFQEEDEIKSRNKHTHHAIDALVLTLIPNNSSHRERILKEYYKAIEEDKKEGIKALKSSELMQKLNVQKFITEIENSTLIFNYKKNKVLKQTAKTVRKRGKKQYLKDRKGKFALNENGDKILLKAKGDTVRSGLYAQTYLGKIREVERDNFEKEINVEKLNLKIKVIGLPIKRRNNDWAYKQGRDEFSYVKRDDINKIKVSEALINNIVDPCIRELVRKQKNNAEIIDSQGNVIRHVRIKVNAGKEVKERINYRSKHEYKNKFYSESGSIPYAVFLQKPVSNGIERKMIPVASYEIAKMYKKTGKFDIEQYIQENYADFASWNKTLLKVGQKVLVLKEDSEYESRGNIDFQMNRLYIITQFKYDGSKILLQYHLEAQSKNDIDKNIKSIKDGIVKEKEVELGIPLIKEDENISNLVDRKKDYQKRVEDFTTRLKIISIHSSSEIANTIKMNIEQYKTESSVITIEGQTPILGLSKKNWNFLLEGVDFVMCFDGTIIFDNLNSIK

SEQ ID NO: 24090 - protein, 1554 aa, unidentified
  REGION 1..1554: note = Cas Enzyme sequence
VEKGTKDLHKKPNNMAKILGLDLGTNSIGWAVINAKMANGKVEEYLSIDDSGVRIFPEGVEPTTIGQGDKEQSKNANRREHRQMRRQFYRKKLRKVKLLETLIDLKMCPLSEEGLNQWSKWYKDKKTEGKQFPTEDAFVDWLKLNPYELRAKALTEMLSLMEFGRILYHFIQRRGFLSSRKGTEDGAIFKGKDNMSGIDATRGLMNGQTLGKSLFDISYKEGEKYNRKKDFEGNELRVRARYTQRNMYISEFQQIWEKQAEALGLNTKEIKIKKVRFLNGNAANNRNRKKISGYFNAYGKENVLIEGKRITTFKYIPLKTFLAGEIKVENEQLKFKSNESLLFWQRPLRSQKGLLDNCRLENNLPVIMGNGAFRMKNGKVLKRSKKPCPLSHPEFELFRAYQLINNIKYGKGRLLTKEQRELVLDLINSKDSNFNFDLIPKALNLTYEKFNYEDDQKIAGNTTIKKLKPLFAEEVWNADYEKIWHCFFFFEDNDKLFAKLRKDFSLKANDSDKIAKIRLKEGYANVSLKAIRNINPFLEKGYSYSDAVILGGIKNAFGKRWDYFDVDDTIDRLEKDVIGILHENNKEGEAIEKVKDYLADPFNSYGFTKDDPYFTQLYHHSQEISVKELQEFVPEVENLRNPIVQQGLQEMRRLVNSLLNKYRVNNPDFKFDRIHIEMGRDLKNNKTKRRELTLKIRDNEQKNDEARKRLAEFGIRPTRDNLLRYLLFDEIQKHISGPVLCPYTGKVIGISDLLGGGNTVQIEHIIPYSVSLNDSFANKTLCEAKFNSLKAEKTPYEFYSQNPDPKLWGIKKHEKSEDGWSEIAERAFKLLPYPKARRFTSKKKFEKATFIERQLNDTRYISRKAVELLSAVCEDVRMLPGQVTAELRHLWGINNILNPVNGFEKFEAEVRGEERLSYYVVADENNRVVDMVRKTNDRPNGANNQLVISGSIDKGRFSSKYLSLKIDVPELSNGNYWALLNVSEPHSFQPVFADKPESNEEQIVLKGRVEKETFINDSVTRRIKTPGYANGSYWARFSIVNKEFKFAEGRGKIKATGNKIALFGEVKEGLFTCHIYHCDTNLVDGKYWVLLELDFENAEFTRTVNPKPDVDERQLLSYATVDETGAMAADPDPGYQVKTNQPTGRYYCTFDIQSVDRTFFPMENEAPKFQKDQRLTEAVVWVDEATGEIKYDPKKNRDDHRHHAIDAITVALTEQGYLQRLSTYHAKNENAKRGIDSTENFPEPWKGFARDVKKATEAMLISHKQNNKVLTKISKTVTKNGEKHRSVGFAARGQLHKETVFGKRQPPNHNEAYHIRKPITGLKDKKQIDKVVDDKIRQLILEHLRDNCGVDISNDKFSVPKDAFFKDGQPRLFLPNRKGGEPVPVKKVRMREVVSNAEQLKIGINQFVNPRNNHHIVVFERNDKMLDKDVVSFLRVVERKLNNEPVVQLPSDGKKLLCTFEANDMFLLGLTDDEFYDYKHDMVELSKHLYRVQKIAGGSYFFEICFRHHTDSRKDQDAKQDYKYIKGFGTGTTGWYTYNPIKAKIDPLGNIEKI

SEQ ID NO: 24091 - protein, 1427 aa, unidentified
  REGION 1..1427: note = Cas Enzyme sequence
MSKNILGLDLGTTSIGFAHIIEGNSPEQSSIKKIGVRVNPLTTDEQTNFEKGKPVSVNADRTLKRGARRNLDRYQDRRKNLIDVLLKANIITKETVLAENGKNTTHSTYFFRAKSAVEKIEKDELARVFLAINKKRGYKSSRKAKNEDEGQIIDGMAVAKRLYEENLTPGQLAFQLLKDGKKYLPDFYRSDLQAEFDQVWNFQKQFYPEILTDEFYKELKGKGQRATSAMFWSKYSFNTAENKAKSREEKKLQAYLWRSEAVDKQLEKEEVAYVITEINNNLNNSSGYLGAISDRSKELYFNNQTVGQYLYEQLEKNPHTRLKNQVFYRQDYLDEFEKIWETQTKFHPELTEKLKTEIRDIIIFYQRKLKSQKSLVSFCEFESKEIEIEKNGQKVKRTIGLKVAPKSSPLFQEFKIWQVLNNVLVRKKGSRKRTVKKDIEPTLFEEEKEIFVFDLETKQKLFDELNIKGNLKSVKIIELLGYKSADWEINYSELEGNRTNKALFDAYLKILELEGYDEDLLKLKGKDDIDVSELKASASEIKEMVKRIFEVLNIKTEILDFDAELDGKDFEKQASYQLWHLLYSYQEDDSKTGNDTLFRLLEEKFGFKKEHSQILANVAFSDDYGNLSTKAMRKIYPFIKELHYDKACLQAGYKHSVSSLTKEEIATRPLKNQLELLKKNSLRNPVVEKILNQLVNVVNTIIETNSKKDENGNIIEYFKFDEIRIELARELKKNAKERAEMTTNINASKIENDKIRNTIIKDFPHIKNPSKNDIVRYKLYQELAFNAFKDLYTDEKIDYEKLYSKNYDIDHIIAQSKVFDDSFSNKILVPRQANLDKGNKTANDYMANKSPESYEKYKSIVETLFKEKKITKAKYQKLLKQESEIGDGFIDRDLRDSQYIAKKARNLLYEICRVVTPTTGSVTDKLRQDWDLINIMQELNFEKFKTLGLTEMVQKKDGSFKERIVDWSKRNDHRHHAMDALTVAFTKQSHIQFLNFLNARKDESHKLHHAIVGIENKETTWVYDDDGNKKRVFNLPIPNFRELAKEHLENVLVSHKAKNKVVTKNKNKTKAKNGEKIKVELTPRGQLHKETVYGKYQYYINKEEKVSAKFDETIIQKVANPIYKKLLLQRLSENGNDPKKAFAGKNVLSKNPIYLNNEKNEMLPEIVKLTWLEEDYSIRKDITPDNFKDVKTIEKILDEGVKRILFNRLKEFGNDPKKAFSDLEKNPIWLNEAKGISVKRVTISGVKNAEFLHYKKDHLGNEILDENGKRIPVDFVSTGNNHHVAIYRDEKGNLQERVVSLFDAVQLVNAGESVIDKNYNQGLGWQFLFTMKQNEYFIFPNEKTGFNPNEIDLLDPKNKKEISPNLFRVQKIASKNYFFRHHLETTVEEKKELNGVAYKPQLGLNAISNIIKVRLNHLGDIVKIGEY

SEQ ID NO: 24092 - protein, 1565 aa, unidentified
  REGION 1..1565: note = Cas Enzyme sequence
MKRILGLDLGTNSIGWSLIEQDFEKKEGKILGLGSRIIPMSKDIMDKFGSGQSHSQTAERTAYRGTRRLYQRDNLRRERLHRVLNILDFLPEHYANSIDFENKRGQFYNDGEVKLNYKPVENSSKRTHEFLFRDAFFEMVAEFKDKHPELFYKKTNGEETKIPYDWTLYYLRTKALNKRINEQELAWLILNFNQKRGYYQLRGEDEEIDNTKVEEFYSLKVSDVGETEDKNTNGTWYNVILENGWVYRRQSKESLDGWVGKTKEFIITTQLDENGNPKIDKEGDIKRSFRAVDSEKDWIAIKKKTERDIENSNKTVGQYIYETLLANPKQKIRGKLVKTIERKFYKDELKQILEKQVQLTKKLQDKNLYKACLEELYPRNDAHQQKIIEKGFVYLFLEDIIFFQRPLKSQKSNISGCTYETRTYKKIVDGKEETKTEAIKAIPKSHPRFQEFRLWQFLQNLKIYQKEAQVGGKTVIDYNVTNLVFENEDAWIALFDFLNTRKEVEQKHVIDFLIKEGKIAKKEKDNYRWNYVEDKSYPANETKAQFIFRLKKVESIGKVDEVLTEEFEQSLWHIIYSISDKIEFEKAIKQFAKKNKLNIDSFFENFRKFPPFDSEYGAYSLKAIKKLLPLMRCGKYWKEEEISVGVLQKADSIRERLETIGFQKVKIDDSVADDDIQKQVLKSFTDFADKSMLQGLNTYQACYLVYGRHSEAIETAKWETATEVDNYLAKFKQHSLRNPIVEQVVTETLRVVRDIWQYYGNGEKDFFKEIHIELGRDMKNPADKRKQIAARQQENENTNQRIKQILTELMSDPAVEGDIRPYSPSQQEILKIYEEGIYQNPKAEYRDLKEDEVEKIRKTAKPSVKDISRYKLWLEQGYRSPYTGEMISLGKLFTTAYQIEHIIPQARYFDDSMSNKVICESEINPAPYKGNQLGYEFIKKNSGRIIPELSTKDKSVRLFTIEEYEEHCKQYFIKNKSKLTKLLMDDIPEKFIERQMNDSRYISKLVKGLLSNIVKDADEQATTSKHVIPVTGSITDTLKKDWGLNDKWNDIIAPRFKRMNELTQSQDFGYFDKSINAFRISVPDELQKGFNKKRIDHRHHAMDALVIACATRDHVNYMNNQYAAKDKKEERYDLRDKLRIVEEKQITDKTTGNKRTIKVGKEFIKPWNGFPVDAKNALEKTVVSFKQNLRVINKTTNKTWQWVEKEGKLKKQLVKQTKGDSWAIRKSMHKDTVSGKVNVRIKKTLAFATGIKDWENLVDKRLKSILKKLISEGKDAKTITKYFKDNPYQKEGKTVKQVEVYAYTSKATATRMMLSESFSRKQLDCVTDSGIKNILENQLKNYIDEKGNERFDLAFNPDGVAAMNENIVELNGGKVHQPIYKVRVYEEGSKFNVGYAGNKARKYVEAAKGTNLFFAIYWNEEKQKREYETIPFNEVIEHQKQVAHLPKEERTPVPINKEKGQFLFSLSPNDLVYVPTAEEIQKTSLVNFKALSNEQVKKIYKVVSSSGYQCFFIHESVSTSIANKIEFSALNKMEKSIDDIMIKEICWKLEVDRLGNITKIIRGLH

SEQ ID NO: 24093 - protein, 1382 aa, unidentified
  REGION 1..1382: note = Cas Enzyme sequence
MKRILGLDLGIASIGWALVNEAEQENETSSIVKLGVRVNPLTSDEQTDFEKGNPLSLNADRTLKRQARRNLQRYKQRRDSLIRIFIENGFINEETVLNENGKNKTFETLRLRALSASGQVSKEELVRILLAINKKRGYKSSRKANNEEEGSLIDGMSIARAMYENNLTPGQFVLQSLKNGKKFVPDFYRSDLRDEFDKIWNFQKQFYPDILTDDFYKKLDGQGMRNSTSLFKSVYGIYTAENRGKREEVKLQKYQWRSNAILLELPIEVVAYVLVEINNDLNKSSGYLGAISDRSKELFFNKESVGQNLYRQIKENPHTSLKNQVFYRQDYLDEFEQIWETQSVFYPEMTKELKEDVRDHVIFYQRRLKSQKHLISHCEFEPYHKVIPKSSPLFQEFKIWQVLNNLAAKRVGSNEIYEFDLETKEYLFQQLNLKGKHTPDEILKLLNLSKKEWKLNYANAIEGNSTNAAYLEVFHKIAENEGYGFDWDKKSATQIKDELYAVFQSCGISNEILSFNSDIEGDDFEKQIAYRFWHLLYSAEDDVKTDSDDQLIYGNNSVSLKKNLHKKYGFKPEYAALVAGISFSKDYGNLSSRAIRKILLFLKEGHEFSEACKLAGYNHSHSLKKEELQSRELKPHLDLLKKNSLRNPVVEKILNQMVNLVNQVIDTYGKPDEVRIELARELKKSAEERKKMTQHITQATRKHEEIKLRLQTEFGIKHPTRNDIVRYKLYEELRENGYKTVYSNKYIPKEKLFSKEIDIEHIIPKSRLFDDSFSNKTLEYRSVNLDKGELTAMDFMEQAYASQVEVYKQRVEMLHKAWFSSGGETGISKGKAKKLLMSIKDIPEDFIERDLRNSQYIAKKAKQMLFEVFRTVSATSGSITDELREDWGLINVMKEMNLPKYRALGLTQKIVRKDGREVEQIIDWTKRNDHRHHAMDALTVAFTTSSHVQYLNNLNTAKDKNSKLYGIKQKITEVIKTDDGNSRVFIAPMPNFREEAKKHLEGILISYKAKNKVFTRNINTIKQKNGEKKVMQLTPRGQLHEQTIYGKMNKEVVEEVKLGTKITHEVASKVTKQKYKEALLYRLAQNENNPKKAFSGKNAPAKQPVVLLDGSGDTVPEKVKVKSYEDYFTIRKEIAPDLKLDKIVDDGVRNALLQHLEKHNGDPKKAFSDLDKNPVWLNEKAGISIKRVTIHGVNNAIALHDKRDQFGNPILDENGKPQPADFVSTGNNHHVAIYRDENGKFQDQVVSFFEAMVRVNSGLPVVNKEYRKDDGWEFLFSMKQNECFVFPAKNFNPHELDLFNKNNRSIISENLYYVQSLSVLNYGNSTIRDFIFRYHLDSMKLKRKELKEFMYFHIKSLSDKRLMECIKVRLNHLGDIVQIGEY

SEQ ID NO: 24094 - protein, 1265 aa, unidentified
  REGION 1..1265: note = Cas Enzyme sequence
MKRILGLDLGTNSIGWALVEKDEKKKEIIGMGSRIVPLSPDDKDEFSKGNTISKNHRRTVKRTQRKLYDRYQLRRNALIEELKNKNMMPDEDLIHVSKFRLWELRSKAVETKLTLPEIGRILLHLNQKRGYKSARSEENLDKKDTEYVEKVKNRHEELRDAGLTIGQYLLKELKKSENFRTKDLVYPREAYIEEFDRIISIQKGYYPEELSEDFIQRIRNEIIFYQRALKSQKGLVSICEFEGFWMEKEGKNLYVGPKVAPKSSPLFQIEKIWETINNIRLKDKYGQPIVLGIREKEKLFKVLNIPGAGSEDFDNFSKYSLDRNGKLSYSKLLNLLGLSKDDVYANKQLENGIQGNILRQKILNCFNNPDEFSELLRFDISFIKTDKKVHLYDRKTGEVIHEEKESIIANKAEDIEKEPLYRLWHVLYSIKDREECENILKKKFNIPPDSAEKLSALDFTLMAFGNKSVRAIRRILPYLAEGYDYSESCMLAGYNHSNSLTKDQNRDRQIAERLSLLEKNSLRQPVVEKILNQMINLVNAVIEEYGHPDEIRIELARKLKQSRQERFDADKAIRKIERDNQSIRKELVENYALRASRNNVIKWRLYHEMNNQKLNAICVYCGQPISFTDAIKGNDVDIEHIIPKAKLFDDSQSNKTLSHRSCNRQKDKQTAFDYMKTKKEDEFHEYIERVNYLYKNRLIGKAKRDKLLMSEDKIPQDFIQRQLRESQYIARKSREILMEVCHDVWTTSGTVTAELRHIWGWDDVLMNLQMPKYKKYDLTEEIEFENNGQKHKKERITDWNKRNDHRHHAIDALTVACTEQGFIQRLNTLNSGKTRNEMLRAINEFQKNASEVDNKRSEFEIEKRKLYQDYLFVNKPFSTNEVEQAASKIMISFKPGKKVATWGKRKVKRNGRKVTVQSDILVPRGALSEEQVYGRIKVLKRENPVKFLFHNPHLIVKERIRKKVQKRLSEYDDNPDKALKSLENEPIYIKDDILLEWASCYSEEYVYKYKVDVDFKKADKIIDDRVREIVKQRLSEFDNNPKEAFKDLDGNPIWFNEEKNIPIKSVRCFTGLSSIEPLKKNANNEVTGFVKPGNNHHIALYLDENGKLQEHICTFWHAVERKKYDIPVIIKNTDEIWEKVLSEGEDYFPNDFLEKLPDIKWQFVTSLQQNEMFLLGLPEENVRQINVNQKDNYSFLSDYLYRVQKITSGDYVFRHHLETQIVDTTDSKLCKRWYRVQSLKAFAGLNPVKIRVDVLGRMVWYQKCF

SEQ ID NO: 24095 - protein, 1600 aa, unidentified
  REGION 1..1600: note = Cas Enzyme sequence
MFSQRNNPYCELLQIERRRYGKQLKKQKNMKKILGLDLGTNSIGWALLNATENGKTLKPESIDAMGSRIIPMDASVLNDFDKGNSKSQTAERTGFRSIRRLNERNLLRRERLHRVLHILSYLPEHYDAQLGWDKSINKTYGKFIESKEPKLAWKEVAVNKYEFIFKDSFNEMLEDFKDHQPELVANGKKVPYDWTIYYLRKKALESAVSKEELAWIILNFNQKRGYYQLRGEEEEENLNKLVEYYALKVVNVERTIEQKGKDYWYNVHLENGWVYRRPSNIFLDWEGKTKEFIVTTDLDVDGNPKLDKEGEIKRSFRAPKDDDWTLLKKKTEADIDQSNKTVGAFIYDALLNKPNQKIRGKLIRTIERKFYKSELNAILEKQKEYHPELSDNKLFRQCIEELYLNNISHRRGIEDKSFTYLFVDDIIFYQRPLKSKKSLIANCPFESYNYVEKETGEKKTDPIKCIPKSHPLYQEFRLWQFVLNLRIYQKERLVEKGNKDIDSNGVLKARTKEKLETDVDVTSEFLKDEQDYLALFEWLNDRKEIDQKAFFKYPAFGLKKNASDYRWNYVEDKPYPCNETRSLILNRWEKAGIARESLTTEIEESLWHILYSVKDKHELEKALNSFVSKNGLNDDFTENFKKFPPFKNDYGAYSAKALKKIVPLMRIGDKWTEEAIDKNTRARIEKLINGEFDEKIRNRVREKSIKLTDINHFKGLPVWLASYIVYDRHSEAKDITKWHEPADIDKYLNTFRQHSLRNPIVEKVILETLRTVRDIWHKAGQIDEIHVELGREMKNPADKRARMTKQITENENTNLRIKALLMELINPEFEVENVRPYSPSQQDILKLYEEYALNSNERYDATLRKFVPEPELPAFVDEIIQKFKENDVKKQPSRSEILRYKLWLEQRYRSPYTGEMIPLGKLFTSAYEIEHIIPQARYFDDSFSNKVICEAEINNLKGNELGYEFIKNNAGRKVELSFGKTVEVLSVEAYEKFIRDNYSRLRGKKKKLLMEEIPDKFIERQLNDSRYISNEVKKLLSNIVRTKDVNGEYEQETVSKNLISVTGSITDRLKKDWGLNDVWNSIVIPRFERLNEVTGTKDFTTTNQNGHPIPAMPLELQKGFSKKRIDHRHHAMDALVVACATRDHVNLLNNEAAMAKNNANRYQLSRKLRRYEKTVVIRNGEKKEIEVAKEFLKPWQSFTYDAHAFLCKIIVSFKQNLRVINKTTNKYESYYDGNGKLKIGKNGLPVKQLVAQSKGDSWGIRKPMHAPLPYGERDYSFTVLEISSNLGKRKFIENDEIRDKVEKVIAEHGTIGKAQSYLKKNPLKDTNGNLIKFTVFNVSETRYRKRQPIFKLANRGQGGVKTTEQAINLINKVSDKAIRQALLLYLEENGFELDKAFSVEGIERFNSKRNKPVYKLPIAEASSQKYQIGYQRNKNLKYGEAESNTNLYFAIYWNEAKQKREFETIPLNIAIEHQKLVAHLPKTERTPVPVNKEKGIFLFALSPNDLVYVPTLEELENPSLFDKDRLTADQVNRLYKMVSSSGSQCFFIQNHVSNTIVNKVEFSALNKMEKTIDGLMVKEICWKLNVDRLGYIVSAMNGQR

SEQ ID NO: 24096 - protein, 1185 aa, unidentified
  REGION 1..1185: note = Cas Enzyme sequence
TLEYRYYKQKDKNGKEVEVKEYLKAIPKSNPFYQEFRVWQWLHNLKIYSKSDDTDFTAVFLKSTEDWESLFEFLMLKKEVNHTDILNHLITPIVKEKYPDAKPKALKSEILKEIAKYRWNYVFDDSKEKEEEKSKKYPMNETGYEIRRLLDKVENVPANFLTRNIEQELWHIIYSVKDPIEYETALKSFAKRNNLEVNSFAEEFKKFKPFKSEFGTYSEKAIKKLLPLMRIGKYWDDNYIPKTIRNRVNAISERLKTIKEEKEIEKIADDDIPKQILKSFFGLVELTKGLKLYQASYLVYGRHSEGISNERWGMSQDIQEYLYRFKQHELRNPIVEQVITETLRTVKDIWEYYAESNNIPYEMVYDEHKKKKVRSYPNFFNEIHVELGREMKNTADDRKRMSSQISSNENTNQRIKLLLMELKNDNSIEEVRPFSPIQQDILKIYEEGALGRYSEQELKNEAFENAGKDEAKNVYEVSRKAYPTKNELIRYKLWLEQKYCSPYTGQPIPLSKLFSTNYEIEHIIPQSRYFDDSLSNKVICESAINPKPYKDNQLGLEFIKNQGGRIIEELSTNGKLVRLLTEDEYRKFVEEHYSNNKVKRNKLLLEEIPEKMIARQMNDTRFISKYVMQVLSNIVRDEKTGSNDDGVNSKNIIPCNGQITNRLKQDWGLNDIWNELILPRFERMNELTNRTDFTATNREGHTIPAIPFEYSKGFSKKRIDHRHHAMDALAIACATREHVNLLNNEHAKSDKQRLDLRSKLCYKKYNDNSKQDYKWIFKKPWGTNEYQSLIKSSVEFPVDAKNELEKIVVSFKQNLRVINKATNNYQKFENGKKIVVEQKGVNWAIRKSLHTPMPYGRKVYEYDVLKIAENVGRRALIIDDEIRAKVESSFKANGSKITDTQKFLKKQPVKDEKGNHIIATPFKINSEKYRRRQPILELANRGKGGIKTIDDATNYINKVADVNLRKDLLSHLKSCNNDIESAFSAEGLDNFNLKRKIPVYSLPITESGSGRFPVGNRIGTRHKFVEADKGTNLFYAVYMNEDGKRSYETIPLHIVIERQKQYLNSVPERNENGEKLVSYLSPYDLVFLPTEEEQVNINSIDFRNLSKMQLKRIFVVNDFSGYTCYFRPNHFANNIAPKEVDLSFDILKNKLSGSFDSKTTNFQGRPIKEFFIKLKVDRLGNISKA

SEQ ID NO: 24097 - protein, 950 aa, unidentified
  REGION 1..950: note = Cas Enzyme sequence
VLKSLYQIFINLTTLSKHRGFKSNSKKDKSLGGGTETGKMLSAVSSLEARIAESGAETVGEYMAGLDRKRNRRGFDDKAVYDNTILRDLLAKEANILFERQRSFGQNNASDALLTSFKEIAFRQEPLKSVEGLIGSCLFEPGEKRAPKHAYTSEKFRLVQRLTVIRLRYPEGRSERIASLKVKELAGTLGTSKGITYKALRNFLKLDSSVLFEGLDYGKKDKAGKEVDAEKSDIVTRTRACAEGSHTFYKVLGKNIYSGFVEKYTENGQRVIDAASRIISVNDDLQKISEELANLPLPEQEVRLLTEAVHEGRFSHFRGTMNLSLKAMQNILPHMIEEQDYAAGCEASGYDHAKTRPVNPDAIRNPVVRRILKEVRKQFRAVIRELGVIPGRVHIELLRDMGKSAEERNEIENSIKRRTAEKKQAREYFASLVHKRPEDISVTELMRYELWKEQGGKCAYWILWRHCGGGRHYTAGHMPEGSIALTSLLDEYNQVQIDHILPRSRTFDNSFHNLCLCSTAANQAKGNLTPWEWLGRDNPEAWHEYEAWIRSLRIKGLKKRNYTLKNLDQDREGRFHERNLTDSRYAARLVLAWFAEEYGNLGVDDHDLEGCAINRFRSRPGQLTSILRQSWGVNGLKYDDMKQRVGDRHHALDALVVACCTESTLQKMTQLYKLMEHHQEKYRLTPQIPAPWDNFRNDAARMLRNVFVSRAERGNTKGALHEETLRQVRVEIDDNGNEREIIYERVAIKDLNENDLVRIKDAERNKWLIDILRAWIAAGKPKGTPPSSPKGDPIRKVRLRRGAFTSGIKVARGEGLAQADNAKMVRTDVFTKDGKYYLIPVYTSQIARGEAPNRAVVANKPESEWTLIDDTFSYLFSMTPNSYIVTEDRKGLIREGYFTSTDRTTAAITLRQANDHTKEIRSGTKTLKLFQKYRVDRLGRLYRVRKEVRP

SEQ ID NO: 24098 - protein, 1058 aa, unidentified
  REGION 1..1058: note = Cas Enzyme sequence
MQHKMRYRLGVDLGTTSIGWAMLRLNEHDEPCAVIKMGTRIFSDGRDPKDGSSLAVTRRLARQMRRRRDRLLKRKARLQAALVRLGFWPASVAERKALEGLNPYVLRSQGLDRALTPAEFGRALFHLNQRRGFQSNRKTDKKDSESGLLKSAIRKLRETLAAEGARTVGEWLARRHGARQSVRARLRGKSAKDKAYDLYIDRSMVAEEFDRLWAVQAAFNPKQFNEENRGELRDILLHQRNLRPVRPGRCTLLPGEERAPLALPSLQRFRIYQELNHLRLVAADLTESSLTLHQRDQLARLLEHGDLTFPKMRRALGLAGSTQFNLEDVKRDRLKGNTASKMLGAADTLGDNWHSLPAEVQDEVVAQMLEEASESRLVGWLVSRLDIDEALAERLAGMALPEGYGSLSLAAISKVLPELQREVVTYAEAVIRAGFDSHSVLSHSEQTGEVMDSLPYYGQALQRHVGFADPRARADDPPEKRFGRIANPTVHIGLNELRKVVNGLIQRYGHPSEVIVEVARELKQSQARRKEENERQAERQKDNERFSADIRTLAGMAGREPTRDDLQRMRLWVELNPQDAANRRCPYTGEPISMAMLFSAEVEVDHILPFSMTLDDSLNNKVVALRRANRDKGNRPPAEAFGHSPVCYDYESILQRAALMPREKGRRFAPDGYQRWLREDKDFLARALTDTAYLSRIAREYLSLVCPANRVRVIPGRLTAMLRGKFGLNAVLSANGVKNRDDHRHHAVDAAVVGVTDQGLLQRFARASAAAHERHLNRLVEDMPLPWPTFREHVARGAAGIIVSHKPDHGHEGALHNDTAYGLRPNNEVAHRVMLDNFKSGEDVARRTWADSRIAQQLQEQTAGLSGKAFLEKLEQATAPSGMRRLRMLEKLTVIPMASPSAADRHGLDEDGNPRPYKGYKGDSNHCIEIWRNDKGRWESRVVTTFEAYDIARAQGPQRLRHPGLAQDGQPLVMRLHVDDCLRLEDAGASRLMRMVTASSAGRLSLVEVHEANVDKRNRTKQDGFAYTYKMASTLQTARARKVTVSPIGEVRDHGFKP

SEQ ID NO: 24099 - protein, 1346 aa, unidentified
  REGION 1..1346: note = Cas Enzyme sequence
MKKILGLDLGTTSIGWAFIHESESDSEQTEIIGAGVRLVPLSKDEIAEFSAGQQISTNANRTLARSARRGLQRYKLRRAALLNVFLQNGWIKPENHYAEVGTLSTHSTISLRAKAATEKIEFTDLLKVLISINKKRGYKSSRKDKFLAENGVAIDAMVIAKELITTKQTPGQWVHRYFTEAGFAKVPDFYPSDLKNEMNLIIDFQHSFHPEIINETLFERLSDKTSKTAANFFTKELNIELSEHLGLRSDRIKNLYFLRNKALFEELPLGDIALILSEICGQISGSSGYLAAISDRSKQLVVKNQTVGQYMWELLSSNPHDRTKGLIFYRQDYFDEFETIWNCQSQFHPELTQPLKEEIRDVIIFYQRKLRSQKHLISNCELEENRKCIPKSSPLFQTFRIWQNINNLEITDSSTGEKAILDEAAKNHLFSFLNQREKLKGEEAKKVLGLSKYHELNFKEIQGNRTRAAIIDSFLKICDLEGHSLERDLKNAVAFEESLSQMLLHFNMPADLLSYNLNGAQDFNNLEKGWFHQLWHILYSAEEDQFVKKWFQEKLSFSESWSKAFLSTPLETDFASLSAKAIKKILPFMMDGTRYDEACVLADYNHSKSLTKEQQDNRILVNRLVEVKKNSLRNPVVEKILNQMVNVINAIADSVKYGKPDEIRIELARELKSNVAQRKSMTSSIADNTKKNEQIKNTIRKEFGDGYVTRNNVLRYKLWEESGKISIYTGKPIQGSELFDSLYDIDHIIPQSRLFDDSMSNKVLCERSLNIEKGNKTAYSFLLEKYGENSTEFQQFLSRVKDLKFRGLIKFSKSQKLVTSDEKIPNDFVDRQLRETQYIAKKAKDLLNTFARNVVSTSGEITDKLRKDWGIEELLKELNLERYSSRPDLISKSNNAQGRVVTRIENWSKRDDHRHHAMDAITIALTKRAYIQYLNTLSAKTDKNSITYALENKYLVRDTDGKLKFISPIKDVRSAYKKALQQILISHKAKSKVITKNTNRIKTKNGVITATLNQGSVRGQLHLETVYSQFQRYETSYIKIGAATTLEQINSISNQRYRNAVKKRFDEYGKDSKLAFGGKNAITKNPIYLDEREQFKIPEKLKITNIVGDYSIRKPIAPGLKLDKVIDEGIKKILQKRLVEFGGDDKKAFVNLDQNPIWLNKEVGISIKTVKIKGISNAISLHEKRDHFGNTIINNGKAEPTSWVNTGNNHHVAIYKDENGKLSEDVVSLLEAVTRKNLGLPIILEEHPEKGNLILSLKSNEMFLFPSETFDPFNIDLNDTSNYTLLAKHVYRLQKFSSFYYVFRHQYETKITVDKDIKDITYASIRSIEPLMKIRKIRINHLGEIV

SEQ ID NO: 24100 - protein, 1263 aa, unidentified
  REGION 1..1263: note = Cas Enzyme sequence
INKKRGYKSSRKAKNDDEGQAIDGMAVAKRLYAENITPGQLAFQLLKESKKYLPEFYRSDLLSEFNKVWDFQKQFHPEILTDEFKKEIEGKGQRATSASFWNKFKFNIAENKQKTRVEKKLKAYEWRAKAITEKLEKEEVAFVLTEINNDLNKSSGYLGAISDRSKELYFNKQTVGQYLYAQLVANFHTRLKNQVFYRQDYMDEFEMIWEEQAKYHLELTAELKTEIRDIVIFYQRKLKSQKGLISFCEFESKEIEIEKDGKLIKRTVGLKVSPKSSPLFQQVKIWQILHNIEFRNKITKERVFPDLASKQLLFEELNIKGNLTANKITELLGYKTKDWELNYKEVEGNRTSQALYEAYLQILELEGYDEDLFKIAGKDEIKLADINTSSNEIKNMVKTIFETLGIEVSILDFDAEIDGKAFEKQSSFQLWHLLHSYEGDDSNSGNETLYALLNRKFGFKKEHAQILANIIFASDYGSLSAKAMRKIFPYLKENNYSESCKLAGYNHSSSVTKEENEKRPLKGKLELLKKNSLRSPVVEKILNQMVNVVNAIIEDPSLGKPDEIRIELARELKKNSKERAEMTLNINSAKIENEKIRKLLSQEFGVKNPTRNDIIRYKLYEELKGNGYKDLYTNTYIPQEKLFSKDFDIEHIIPQAKLFDDSFSNKTIVPRQVNLDKGNQTAYDFVSGKYGAAALDEYLLRIEMMFKQKEGSISKAKYQKLLKQGKDIGDGFVERDLRETQYIAKKAKQMLEEVCRKVISTTGNVTDRLREDWGLVNVMQELNFEKYKTIGLTELVEKKDGTFKERIKDWSKRNDHRHHAMDALTIAFTKHSHIQYLNHLNARKDEDNKLHNHIIGIENKETELVIEDNGNKKRRFKQPITNFRLEAKKHLESVLISFKAKNKVVTKNKNKIKSKNGEKVKIELTPRGQLHKETVYGKLQQYVTKEEKVGAKFNEEIIKKVANKKQREALMQRLTEHAGDSKKAFTGKNSLDKNPVYLDEQKLQVVPDKVKLVFMEADFAIRKDITPDLKIDKVIDAGVRAILQKRLDEHNGNAKTAFSDLDKNPIWHNQEKGIRIKKVRISGVKNAEALHSKKDHLGNDILDANGKPNATDFVSTGNNHHVAIYRDAEGNLQEKIVSFYEAVERVNQGLPVIDKKYNESLGWEFLFTMKQNEYFVFPSPSFNPTEIDLLDARNNKLISPHLYRVQKIATKNYFFRHHLETTVEEIKELKNMAYKPQLGLSAINNTVKVRLNHIGKIVKVGEY

SEQ ID NO: 24101 - protein, 1530 aa, unidentified
  REGION 1..1530: note = Cas Enzyme sequence
MKKILGLDLGTNSIGWSLVNQDFENNNGEIIGLGSRIIPMSQEIINDFNKGASISQTASRTEYRGVRRLLERNLLRRERLHRTLNILGFLPKHFAEQIDFERKLGQFIPNSEPKLAYKGIKTTEDKIQYEFIFKKSFEEMLEDFKIHQPNLVLNEKKVPYDWTIYYLRKKALTHKIEKEELAWLLLHFNQKRGYYQLRGEEEEETPNKLVEFHSLKVVKVEDSGDKKSKDEIWYNVHLENGWIYRRTSKTPLEWVGKNKEFIVTTDLNEDGTIKKGKDGEEKRSFRAPAEDDWTLLKKKTEFDIDKSKKTVGCYIYETLLQNPNQKIKGKLVRTIERKFYKNELKQILEKQVQEHPELKDRAIYNTCIEELYENNTAHRENIKGHDFTHLFINDILFYQRPLKSKKSLISDCPFEQRAYLKDGKKEIQSLKCISKSNPLFQEFRLWQFIQNLKIYQKEKIIDGKTQSDVNVTTEFLKSDEDYTTLFDWLNERKEIDQKAFLKYPEFNLKKNIDNYRWNLVEDKVYPCNETHNSIVNRLSKVQIVPVNFLTSEKEQELWHILYSVEDKIEIEKALKTFAFKNNLSEDFADIFKKIKPFDKDYGAYSEKAIKKLLPLMRFGKYWHEEAIHSQTKNRIEKIINGEVDEKIKDRVREKAFHLNSIKNFRALPLWLTSYIVYDRHSEDSNAIQWKNPEDIEYFLKEFKQHSLRNPIVEQVITETLRVVKDIWNTYGNGTANFFDEIHIELGREMKNPADKRKDMTNKMIANENTNLRIKALLSEFLNDANYENVRPYSPSQQEILKIYEEGVLNSEIDINEDILKISKTAQPSTSELNKYKLWLEQKYRSPYTGEMIPLNKLFTPAYEIEHVIPQSRYFDDSLSNKVICEAEVNKDKDKSTAYEYIRDNHGKKIELSFGKVVTIFEEKEYEDFVKRNYSKNRSKLNKLMMEEIPESFIQRQLNDSRYISKVVKNLLSNIVREDDELETTSKHIVSSNGNITNVLKQDWGLNDVWNDIVTPRFERLNELTKSTNFGEWTNKNGKRVFQTQMPLELQKGFNKKRIDHRHHALDALIIACASKNHINYLNNQYAKSETTRYDLQKKLRRHEQIEITDKKTGEKKKINVAKEFHKPWNNFTIQAKESLENTVVSFKQNLRVINKTVNYYQKWVPDSNGDLKKEIVKQTGNNWAIRKPMHKETVSGSVSLRKIKTGASLANAIDNPEMIVDKSLRKKIKQLIKEKNDKKKIQTFFKNSQNKWDDKDVTKVDLYYFDNDNVASRTKLDESFTSKVIDENVTDTGIKKILLKHLEKYNETVGGKISEHPELAFSPDGIDELNKNIIALNNGKFHHPIQKVRTYEARGNKFNVGTTGNKKDKYVEAAKGTNLFFAIYKDETGKRNYETIPLNIVIENQKQGALQNIKPNLCSVPNKNEKGDSLLFHLSPNDLVYVPTNEETENPKSVDFKKLSKEQINRIYKTVSFTNTQAFFIKNEVANTIVNKIEYSALNKMERGVNGEMIKDICWKIKIDRLGKISTVLK

SEQ ID NO: 24102 - protein, 1069 aa, unidentified
  REGION 1..1069: note = Cas Enzyme sequence
VFYRQDYMDEFEMIWEEQAKYHLELTAELKTEIRDIVIFYQRKLKSQKGLISFCEFESKEIEIEKDGKLIKRTVGLKVSPKSSPLFQQVKIWQILHNIEFRNKITKERVFPDLASKQLLFEELNIKGNLTANKITELLGYKTKDWELNYKEVEGNRTSQALYEAYLQILELEGYDEDLFKIAGKDEIKLADINTSSNEIKNMVKTIFETLGIEVSILDFDAEIDGKAFEKQSSFQLWHLLHSYEGDDSNSGNETLYALLNRKFGFKKEHAQILANIIFASDYGSLSAKAMRKIFPYLKENNYSESCKLAGYNHSSSVTKEENEKRPLKGKLELLKKNSLRSPVVEKILNQMVNVVNAIIEDPSLGKPDEIRIELARELKKNSKERAEMTLNINSAKIENEKIRKLLSQEFGVKNPTRNDIIRYKLYEELKGNGYKDLYTNTYIPQEKLFSKDFDIEHIIPQAKLFDDSFSNKTIVPRQVNLDKGNQTAYDFVLGKYGAATLEEYLLRVELMYKQKEGSISKAKYQKLLKQGKDIGDGFVERDLRETQYIAKKAKQMLEEVCRKVISTTGNVTDRLREDWGLVNVMQELNFEKYKTIGLTELVEKKDGTFKERIKDWSKRNDHRHHAMDALTIAFTKHSHIQYLNHLNARKDEDNKLHNHIIGIENKETELVIEDNGNKKRRFKQPITNFRLEAKKHLESVLISFKAKNKVVTKNKNKIKSKNGEKVKIELTPRGQLHKETVYGKLQQYVTKEEKVGAKFNEEIIKKVANKKQREALMQRLTEHAGDSKKAFTGKNSLDKNPVYLDEQKLQVVPDKVKLVFMEADFAIRKDITPDLKIDKVIDAGVRAILQKRLDEHNGNAKTAFSDLDKNPIWHNQEKGIRIKKVRISGVKNAEALHSKKDHLGNDILDANGKPNATDFVSTGNNHHVAIYRDAEGNLQEKIVSFYEAVERVNQGLPVIDKKYNESLGWEFLFTMKQNEYFVFPSPSFNPTEIDLLDARNNKLISPHLYRVQKIATKNYFFRHHLETTVEEIKELKNMAYKPQLGLSAINNTVKVRLNHIGKIVKVGEY

SEQ ID NO: 24103 - protein, 1263 aa, unidentified
  REGION 1..1263: note = Cas Enzyme sequence
MSKIIGLDLGTNSIGWALRNTDLTGNQIEKFGVITFKKGVGLGKSGEYSYAAERTKKRSTRRLYQARKYRLWATLEILISQGYCPLAIEDLNMWRYYNKEEAHKNNNAGRIYPIHNLDFDAWIKLDFNKDGKPDFTSPYQLRKLLAEFPLDLSIDINRFKLGRALYHIAQRRGFKSSRKGAENSNDNVDTIEDIIDLQYSEKKKNKLITELLEKYPQAKTIGWLFAILESEKIRVRENITQYAIRENYKDEIKYIFKTQGINLEDPIYTLLVESSKNKNDGSIFYKRPLRSQKGLIGKCTLEPNKYRAPISHPAFEEFRAWSLLNNIKYKENDTWKLLPLNLKVEIYDELFFRKSKSYFSFSEIENFIKKQGSNWELNYSPKTTISACPVSARLKEIFGNDYLNIKLAKVKSTKSEKDYYNIDDIWHILFSCEDQEYVAEFAEQKLKLDNVNIKRFITAWNACPVGYAMLSLHAIHKINVFLRKGFIYTEAVLLANLPQILEKELWAVNEDFIINSISSVIEDNRNQKSILTIVNTLISKHKNLEANQRHGFRNNEYLLDSSDIEDIDRTITEHFGKNKWSAFTNDYKKIVFNTVKECYQAYYSKQGIIRDEGVEERLVTINADNNKYFRTETGYYQLPKMVDTVKEFLLDNFNHIDKIKLSKIYHPSEISIYPPARETDGQIKLGSPKTGSFKNPMAMRTLHELRKLLNYMIETRQIDCETKVVVEVARELNDANKRWAIEKWQKQREEENNEFAKAIELLTNEDSSIRASSDSNDTIDKLRLFYEQNLEQTLPEVVATEEDKGEKKKKNKSQNTDVAVEWNGYGDKLIDKYRLWKEQGYQCLYTGKYIKLSDLFKENVVDFEHTIPRSKSFDNSLSNLTVCYANYNRTIKNNQIPTALLNYDSEFDYGGSIGICAAIKPRLDAWEEKIKRIKQQIDYWKTKSKKAVDKTWKDKAIRQRHLWQMELEYWKNKLDRFTIKEITSSFKNSQKVDTQLISKYAFHYLKTYFDYVDVQKGSITAEFRKIYHLQAADEIKDRNKHSHHAKDAAVLTLIPVAVKRDTILENYYKSKENKTTYIPDPPFKGFKREYIWSIDDRILINNVTNNQELTPAKRKVRKRGKEIKVNGKNLWATGDAIRGQLHLDTYYGAIKPAKKGKNGNLLKDENGKFIQEDEIKFVQRVPFNADFNKIEKIVDDGLRQQIQLHIKRAGNFKKAYEEGIYLLDKNSNPHGNKIRHIRIWATVSEPLPIKRHTYLSDKEYKQN

SEQ ID NO: 24104 - protein, 1720 aa, unidentified
  REGION 1..1720: note = Cas Enzyme sequence
MKKILGLDLGTNSIGWALIEIDHENKIVRILGLGSRILQMDAGEISKFETGGKLPSKASQKTTDKTARKLNERFLLRRDRLHCVLNLLKTLPDHYKVTIDFETTKGFRSGKFKKGLEEKLAYVEDVNGKSNFLFMDAYKEMETEFKLRQPDLFRVKNNGKITQIPYDWTLYFLRRKALKSEITKEELAWITLSFNQKRGYEKTIGQDEKLRKEGEISEIKIGKVKCVIELDSKENLKLFQIILVDIDNDDKEIYSYKEESLFQITDKDELKEIEIVSKYDENGDINDKDTIYTIKEIREIEIVDVKFTDKKVKENFVFEIVLKTGWIKEQQSKFLPKWKDTKRDFIIKTNYDKNGNRIQKGTDKGRNINAPKEEDWALLKLKTETTLSSFNAKNNTVGVASYIYNSLLDNPNQKIKGDLITVIERKYYREELEQIFDCQKEFHSELEDKELYQKAIHLLYPNNDNHRKLLENYSNSKDIHPFSKLITDDVILYQRDLKSKKSLISNCAYEKQNFIKIDKKTNKEFCEPIKAIHKANPIYQEFRMWQFIKRLKIIQLEDILNDEVIINQDVSDIILSREVKINLFEFLNNREFVTQKQLFAHLKLSDKKYKWNYQIYTDEAKKNEFKERCNETRYNFILRCKRIKGFDWKTFLTPENEYRIWHFFYSVKNSKEFKKGIDTLFQKLLNEGKFSIDFKEDLAKNFVTFGGYSNDYGTYSEKAIKKLLPFLKLEDKLNQNYIEKYEGRIDEILKRVNSIDDKKDIDSIVDDAVSKGVITSFWGFKDKTEFEGLALHQACYLVYNRHSEVGDLQYWKSPKDIETFLQNELKQHSLNNPVMEKVLVETLQLVKNIWENFGNSQANFFDRIHIELGREMKKNTKERAKESQKNNENKKTNDRIIELLKELRKENDAIKVKSPFQQEKLRILEDDLLSSIEYDKDSTIYSLKNSNETISRKDIKEITSKEISKIKKSDFERYKLWLDQRYQSPYTGQLIKLTDLFNREKYEIEHIFPKERITLNSMINKVICETEVNKAKKASTGYQFIIDCKGMKQIKCAAHYNKEITILHPSAYEKLVKDTFTDKRKQEILLSKEIPDQFTSSQLNNTKYISKMAMKLLSNVVREEGEDSFCSKNVLPVSGIVTTKLKQDWQLNDTWNKLIQPRFERLNQITNSNLFGSYEKINGHTVFINRFPEELSGVFDKKRIDHRHHAMDALVIALATESHVNYLNNVSSKDSKDDKLEQRIKIKNKYTETRKNELEEKSRYFLPPAQFKIENNTVKYTYQFKDYNQILFKDVVLEALENTIASFKQKTRIIRQRTNSFQKWNAEEGKIETIQQKDLQKKENFNVRQQLHKATYYGKVKLKRYTKDIPFKDAISNLENIFDSNLKAKITDLKEIQQLTNDEIITKFEKKYPKVKVYEEYVASRFENHLESLGRVKVDKIMQTLESITDVSIQNILKNHLKDYDYTNDKNEIVLNPELAFSPDGIKELNKNIIQLNNGKDHKPIFKIRMSVVLGKMFPVSEIGQKSTKFVVTAGDSNVYCGFYENKIGDRKFIVPKLGETIHSLKQGFHPLKDSLFDLKTNEKFNLLFSLSPSDLVYLPTKDEEENLNLIDFDNLSKEQITRIYKFTDGNSSGTMNFLPYYISKTLVDISKDDYKKTALKELIFEEKNESKKGISTKVKELVNEIGMGSTQSKNQNSLEGIPIKSICLKINIDRLGTIKPFKK

SEQ ID NO: 24105 - protein, 1526 aa, unidentified
  REGION 1..1526: note = Cas Enzyme sequence
MKTILGLDLGTNSIGWALIKQNFENKKGEISGIGSRIIPMSQDILGKFDSGVSISQTAERTAFRGVRRLRERHLLRRERLHRVLNILKFLPDYYASQIDFEKRLGQYKSNTEPKLVYDEQNQFIFKKSFNEMVAEFKKSQPQLFYNKTNGKETLIPYDWTIYYLRKKALSVKIEKEELAWLLLNFNQKRGYFQLRGEDEAEFPNKKVEFHSLKVIDVTADEPQKGKTDIWYNIILENGWIYRRASKLALFDWKNKIKEFVVTTDLNDDGTDKTDKDGKVKRSFRAPAETDWTLVKTKTEQTIDKSNKTVGQYIYGTLLENPTQKINGKLVRVIERKFYKKELEQILKTQLKYHDELKNLELYNACIEELYEHNEAHRNNIAKRDFVHLFLNDIIFYQRPLKSKKSLISDCKFESRKYIKDGIEQNEALKCITKSHPLFQEFRLWQWIQNLHVFEKENNDTPITEKFLKSEDDFVKLFDFLNDRKEIEQEGLIKFLLSPLNLKPKELKLESAKYRWNFVEDKAYPCNETRALMLTKLEKCTSIPNDFLSKETEEALWHILYSVNDKEEIKSALGKFAHKHQLSNDFVEQFMKHPPYKNEYGSYSSKAIKKLLPLMRMGKYWNEENIHPQTKNRIEKIITGEFDDSIRNRVREKAYKLNDINHFRAFPLWLVSYVVYDRHAEDGNLEKWKTPEDLENYLRSFKQHSLRNPIVEQVLTETLRVVKDIWKHYGYSKENFFDEIHIELGREMKNPADKRKKMTEQVTTNENTNLRIKSLLAEMINFKDVENVRPHSPMQQEILKIYEDGVLNSGIDIDEDILKISKTAQPNKADLLRYKLWLEQRYKSPYTGEIIPLNKLFTPAYEIEHIIPQSRYFDDSFSNKVICESEVNKDKDNCLAFEYISNNEGKKIELSVGKFATLFTTEQYEQFIKTNYAKNYSKGKKLMLLDIPEKMIERQMNDTRYISKEVKNLLSKIVRQQNNDEGTTANNLLSTNGQITSALKQDWGLNEIWNELIAPRFERLNEMTNSRNFGDINPNTNKFLPTVPLELQKGFNKKRIDHRHHALDALVIACATRNHINYLNNQNALDKDKKKGQETREDLKRTLCDKKYNADSEKNYRWIFKQPWDTFVLDAKHSLDTTIISFKQNLRVINKTVNKYESYKNEDGTLRLDENGKPVKDIIKQIKGDSWAIRKPLHTPMPYSENKYQFDFLKISENLGKTSLIINLEIKDKVISLLNSNGNKIGLVQKILKSNPIVANNGKTVIETEYKINNTKFRKRKPITDLANRSSQGGITSLDAMLKILNKIYDFELKKQLFKHLEINGNDIDKAFSIEGIERFNELRKISVYKLPIAESSSEKFRISENNRKRHMFFEAEKGTNLFFAIYKDEIGKRNFITIPFNEVVESQKQSATLNQKPQSVPLKNEKGEDLVFHLSPNDLVFVPSKEEIENPNLVDFNILNKEQVNRIYKCVSFSGADCFFVRNDIASSIVNKVEFSTLNKTERSFEGTQIKSCCWKLGVDRLGNITKVIK

SEQ ID NO: 24106 - protein, 979 aa, unidentified
  REGION 1..979: note = Cas Enzyme sequence
KKRKVGPKVCPKSSPIFQEFKIWSQLNNITYNIEGSRKSQGISLELEQMQLLYQELNWKEKLSANEVIRLLNLKGYQLNFNEIEGNRTNASFINALNDFFVKEGHDELVLSKMNSAELIDTLKKLFPIYGIDVSLLNFDSNLGGQNIENQAFYNFWHLLYSFEGDNSKSGIDKLKTALETKFGFPFESNTPITNIKLSDDYGNLSVRAMRKILPFLKEGNRYDLACTLAGYNHSHSETKEDLSTKVLLDRLEILPKNELRNPVVEKILNQMINVINTIFETYGKPDEIRIEMARELKKSAKERENATKAIRQITDEHIKLKRELQAEFGLPNVSRNDLIRYKLYLELKDNGFKTLYSNQPIDRSKLFSSEYDIEHIIPQSKLFDDSFSNKTIELRSVNLRKGNDTAFDFINKEFGEDGLKQYEARVKALFGNQLGKKSKYRKLLMSETEIPKDFIERELRDTQYIARKAKDILSTVVRQVSTTTGSITEKLRDDWQLVDVLKELNWNKYDKLGMTETLENRHGQKVYRIVDWTKRNDHRHHAMDAITVAFTKREYVKYFNNLNAKSEKDGEIYKILKTETYFDKDQKRRFNPPMPLTQFRSRAKEHLENTLISFKAKNKVSTKNKNAIKTAKGKITTIQDTPRGQLHLETVYGSSQYYSSKIEKIGANFDLEKINKVANSKYRKLLLKRLEENGNDPKKAFTGANSLSKRPIFLNALETYTLPESVKLVEFDTRYTIRKPITPDIKIDKVIDKGIQLILQERLNQHDGDAKKAFSNLEENPIYLNKEKGLILKRVTIQGVNNAVALHNKKDHFGKEVRDAKGNPIPVDFVNTGNNHHVAIYKDEKGNLQEEVVPLFEAITRKNQGVEIIKKQHELGWEFLFTMKQNEFFVFPNEETGFDPSEIDLLDPSNFAKISPNLFRVQKIGKGDYWFRHHLETELIDRIELNGSSYKRIRNPKSMNISKKISLNHIGRIVNVGEF

SEQ ID NO: 24107 - protein, 1276 aa, unidentified
  REGION 1..1276: note = Cas Enzyme sequence
MTKHILGLDLGTNSIGWAIIKVDDNNVPIKIIAMGSRIIPLDSNDRDQFQKGQAISKNKDRTTARTQRKGYDRKQLKKSDNFKYSLKKILEKLDIFPTEELMKLPTLDLWKLRSDAVSDIENITPKQFGRILYMLNQKRGYKSARSEANADKKDTDYVAEVKGRYKLLKEQNQTLGQYFYNELSAANQNNTYFRVKEKVYPREAYIEEFDAIINTQKPKHSFLTDDVIHSLRNEIIYYQRKLKSQKGLVNVCEFEGFEITYFDEKTQQNKTIFTGPKVAPRTSPLFQLCKIWEVVNNISLKIKNPEGSKYKWGDRIPNIEEKQTIADYLLENENLSFVELLKILGLKKEQVYANKQILKGIQGNITFSAIHKIIGNSEHLKFDIHTVPSKHLAILLDKKTGEILDEGDSLELSSALEQEPLYQLWHTIYSIKELDECKNALMKRFNFEEEIAERLSKIDFNKQAFGNKSNKAMRKMLPYLMLGYNQSDAESFAGYNRRFTKEEKSKNISDEPLQLLAKNSLRQPVVEKILNQMINVVNAIIQKYGKPEEIRVELARELKQSKDEREGADKQNVFNKKLNELVVTKLTELGLPSTKRYIQKYKFIFPAKDKNWKEAQVANQCIYCGETFNLTEALSGDNFDVDHIVPKALLFDDSQANKVLVHRTCNSTKTNNTAYDYIAKKGNEALNAYVTRVDDWFKRGIISYGKMQRLKVSFEEYQERKKVGKETEADKRLWENFIDRQLRETAYIARKAKEILGKVCHNVTSTEGNVTAKLRQLWGWDDVLMNLQLERFKYANQTKLETWTSDHGNRKHTKEIIDKEIWTKRDDHRHHAIDALVIACTQQGFIQRINTLSSSDVKDGMRKELEEDRIVYNERLTLLENYLVEKKPFSTEEIEHEADKILVSFKAGKKVATISRYKAVGENKKTGVIVPRGALHEQFVYGKIKTISKDFKTGTLIKYPIKYLFENPNLIAEPLIKIKVKERLLDFNNDIKKSIESLKKSPIYLDLGKTILLTSSHCYKDEFVIKYKITDLKKDDVKYIIDEKVKQLVQERLDAHNGKEKEAFKDTLWFNENKKIPILTVRCFTGLSAVEAIKKDDNGKEIGFAKTGNNHHIALYRDDTGKYIQHLCTFWHAVERKKFKIPYIIKNTNTLWNELINKELPQPFLDKLPADNLELQLSMQQNEMFVLGLSKEEFDEAMRQNNKSLLSKHLYLVWSIGDNQYWFRHHLETKNSELKVTLGAKESRRFYLFKSVGAFLSKNPIKVRLNHLGEITKIGE

SEQ ID NO: 24108 - protein, 1368 aa, unidentified
  REGION 1..1368: note = Cas Enzyme sequence
MKTILGLDLGTTSIGWALVKEGENADIIKIGSRVIPLTTDEITNFEKGKSITTNADRTLKRSMRRNLDRYKLRRENLIQLLKENCIIDENSLLNEHTNDSTFQTYKLRANAAKGKIELSEFARVLLMINKKRGYKSSRKAQGEDEGQAIDGMSVAKILYEQNLTPGQFAFDILKNDKKAIPDFYRSDLNDEFDKIWNYQSKFYPEVLNNANKELFEGKAKNQTSAIFYKDLKVESVELVGKMNEKKFQRYELRSKAINEQLLLGELVEVFSDIKGNINNSSGYLGAISDRSKELFFNKVTVGEFLYKQILENPHSRLKGQVFYRQDYLDEFETIWEQQSKFHTVLTPELKKEIRDIVIFYQRRLKSQKGLLSTCEFESFTRDLIIDGKPKTQKYGPKVIPKSSPLFQDFKIWAQLNNVEILDVFGKSKVRDHLELEEMNLLFQELKYTDKLLPTEINRILGFKIKYKYNFEHLEGNRTMAAFIDSFQKILELSGHDDIDLKKMNGIETIKTITDIFSMLGFDTSILKYSSDLEGENHMNQPLYQLWHLLYSYEGDNSKSGIESLLAILKTKYGFDKEYASILSNTKLQDDYSSLSTKAIQKILPYLKEGQKYDKACGIAGYNHSNSQTTAQLDAKVLKDKLTILSKNSLRNPVVEKILNQMINVVNSVIETYGKPDEIRVEMARELKKGAKERENMTKSMNDANRNHETIRTTLQTEFGIKNVSRNDVIRYKLYEELKDNGYRTLYSNTYISREMLFNGEVDIEHIIPQARLFDDSFSNKTLELRHVNIKKGNATAFDFVAIEYGEEGLKQYEERVNALFNKTDKRTMFKKLMWSEKDIPDNFINRDLNDTQYIAKKAKEILEEIVRTVGTTTGSITNRLRDDWQLVEVMKELNTPKYQALGLVEEIENRHGHKITKIKDWTKRNDHRHHAMDAITIAFTKPSYIQYLNNLNAKSDKNGVINAIQNKETYFDKDNKRRFNPPMKLDIFRAKAKEHLENTLISFKAKNKVTTKNKNTTTKAGGHATVISETPRGQLHLETIYGSSYKYETKFEKVNASFDVSKIEKVAKKKYREALLQRLNENEGDAKQAFTGKNSLDKKPIFLDALHTDFVPDTVKLVWKEQQFTIRKGISPELKIDKVVDAKTREILKKRLNDFGGDPKKAFVNLEENPIYLNVKNGIKIKSVSIIEDVKPIPIHNKKDHFGKEILDLKGNPIPIDFVKTGNNHHVAIYIDEKGNLQEEVVSFMEAVTRKNLNLSIINRNHEKGWRFLFTMKQNEYFIFPNEKTGFDPIEIDLMDTKKYSIISPNLFRVQKISSKNYMFRHHLETLIGETNETKDILYKNVRSLNPIKNIIKVRLNHIGHIVQVGEY

SEQ ID NO: 24109 - protein, 1346 aa, unidentified
  REGION 1..1346: note = Cas Enzyme sequence
MKKILGLDLGSSSVGWAFIHEEETTSKIIGAGVRVVPISTDEANDFQKGNAISINKNRTLARGARRGLQRFKLRRNTILHIFKQLYLIPKDFKYVEVGKGTTHQSYAIRAKAAIEQISIDDFVRVLLMLNKKRGYKSSRKGQDASADDGENIGQAIDGMDVAKELLARNLTPGQYSYDLLKKNIKTKLPDYYSSDLENEISKIIEVQLKHHADLPHDLTEQLKNKSKGATYVFFTKTLNIPYAECKGNRDEKKSQLYQWRNLGLSQKIDKEELAFIVGNIKDEIGKASGYLGAISNRSKELVFNNLTVGQYQNQKLLNNPHESQRNMVFMRADYINEFDRIWDKQSQYHPVLSDELKKEIRDITIFYQRKLKSQKHLINFCELEPMHRVSPKSSPIFQEFRMLQNINNIIITGQDFEFDQDVINGMHEILSNAGKMKDTDLLKAIGADPKKVKLNFTEIQGNSTRNEFIKVFLSLWSDLGNDINSLSSPIMSGDVARILKDLSLPENLLDLDLTLEGNEFDKQAFFKLWHLIYTVEDDEVLIKNLEKIFNMPRSYAKALLGVKLENNYGSLSSRAMRKILPHLQEGKEYSVAVILGGFKSHSKSSLTNQENDARILKDKADLVKKNSLRNPVVEKILNQTINVVNAIIESNQYGKPDEIRIELARELKATNEQRKNITASISKATKAHEEIRAKLKSEFNILRVTKNDITRYKLWEEVGCISLYTGKTIPASELFSKNYDIEHIIPQSRLFDDSFSNKTLCERTLNIEKGNQTAFSFLQQKLNPEDFTQYLARVKELTKEGKIKRAKSDKLLLSNKNIPDDFIARQLNETQYISKKAKEILLEVCRNVYTTTGSITDRLREDWGLTDIMKELNFEKYKLCGLTYEETGKNGERLQKIKNWSKRDDHRHHAMDAITIALTKQSYIQYLNNLNASDNQSGITQGLELKHLERKDGKMKFKLPMPNIREEFKTALENILISQKAKNKVVTKNKSKVKTKTGTTERVQLTPRGQLHKETVYGKRLQYDTNWLAVGLKMTEDQINRVARKNEREALISRLRQFDNDPKQAFTGSNSLVKNPIYLDSQLKHVLADKVKLVSFDPIYTKRVGIGPDLDEKKIAKIIDPKIREKLLERLAQHGNDPKKAFVNLDENPIFLDKAQKISIKRVTMNGVSNVEALHTKKDMFGEVVLDANGNPVSNDFISTGSNHHVAIFEDEEGNLQEEIVSFYEAVSRAVQNQTIVKRLHENDWKFLFTLKKNEYFIFGDNDFNPHEIDFNDPTNYAKISKYLYRVQKIQSKDYLFRHHLETTIDDIKELTDKSFKRIRMLNKLRTCIKVRINHLGQIVKIGEYE

SEQ ID NO: 24110 - protein, 1450 aa, unidentified
  REGION 1..1450: note = Cas Enzyme sequence
MKKILGLDLGTNSIGWAIIDQDFENKHGFIHGIGSRIIPMTQDVLGKFDSGVSISQTAERTGYRGVRRLRERHLLRRERLHRVLNLLNFLPPFYASQIDFKKRLGQFKSNTEPKLVYNETNQFIFKNSFNEMVVEFKKTQPHLFENDKLIPYDWTIYYLRKKALTEKIEKEELAWLLLNFNQKRGYFQLRGEEEEETPNKKVEFHSLKVVDVTADEPQKGKTDIWYNVILENSWIYRRASKFPLFDWIAKTKEFVVTTDLNDDGSEKTDKDGKIKRSFRAPAETDWTLVKTKTEQTIYKSGKTVGQYIYDTLLENPTQKINGKLVRVIERKFYKNELEQILKTQQQFHTELKNAELYNTCIEELYEQNEAHRNNISKRDFVHLFLNDIIFYQRPLKSKKSLISDCKFESRRFIKDGLTQNEALKCISKSHPLFQEFRLWQWIQNLHIFEKENNDIPITEQFLNSEDDKVKLFEFLNDKKEIEQEGLIKFLLTPLKLKPKELKIEVAKYRWNFVEDKAYPCNETRALMITKLSKCNIIATDFLSKEIEEALWHILYSVNDKEEVKSALEKFALKHQLGNDFVEQFMKYPPYKNEYGSYSAKAIKKLLPLMRMGKYWNEETIHPQTKSRIEKIINGEFDESIKDRVRNKAFKLNEINHFRALPLWLVSYIVYDRHAEDSNIEKWKTPEDVEDYLKSFKQHSLRNPIVEQVITETLRVVKDIWKHYGNGKENFFDEIHIELGREMKNPADKRKKMTENITTNENTNLRIKALLAEMINYKEVENVRPYSPTQVEILKIYEDGVLNSGIEIEDDILKISKTAQPSKADLLRYKLWLEQKYRSPYTGEIIPLNKLFTPAYEIEHIIPQSRYFDDSFSNKVICESEVNKDKDNLLAFEYITANEGKKIELSGGKFTTLFTAEQFEHFIKNNYAKNYSKGKKLMLLEIPEKMIERQMNDTRYISKEVKNLLSKVVRLQQNDEGTTANNLLSTNGQITTALKQDWGLNEIWNELIAPRFVRLNEMTNSKNYGDINPNTNKFLPTVPLEQQKGFNKKRIDHRHHALDALVIACASRNHINYLNNQNALDKDKKKGKETREDLKRTLCIKKYNADSEKNYRWVFKQPWETFIKDAKDSLDTTIISFKQNLRVINKTVNKYQHWENVHGKMEKVIAIQTKGDSWAIRKPLHKDTVSGIINLPRIKVAKDKILTATRKNLDTSFDLKTIASITDTGIQKILTNYLKLKENNPEIAFTTEGIEEMNNNILNYNDGKTHKPIFKVRVFEQGSKFVVGHHGNKKDKFVEGAKGTNLFFAIYKDDKGKRNYTTIPFNEVVESQKQSAALKQKPQSVPLKNNKGDDLVFHLSPNDLVYVPTQDEIENPSIVDFNKLNKEQVNRIYKCVSFSGIQCFFIKSEVATSIVNKVEYTSLNKIENAIDGTQIKACCWKLEIDRLGNINNFIN

SEQ ID NO: 24111 - protein, 1369 aa, unidentified
  REGION 1..1369: note = Cas Enzyme sequence
MTKTILGLDLGTTSIGWAIVKEGENADIIKTGVRVIPLSTDEIQNFDKGKSITTNADRTLKRSARRNLQRFKQRREHLISLLIANKIISEDTFLTENGNKTTFETYFLRAKAASEKIELQEFARVLLMINKKRGYKSSRKAKGEDEGTAIDGMEIAKRLYEEKLTPGQLVHIRYQEGKTNIPDFYRSDLQEEFDTIWNFQKKFHPNVLTEALHEELFGKSKTVTAAILRKLGFDGVELKGNLSEKKKERYAIRSKAVNSKCSIDEIAEILPDINNNISGSSGYLGAISDRSKELFFNKETVGQFQYKQILSNPHFSLKNQVFYRQDYLDEFNIIWEKQKEFYPTILTEKFKDEVRDTVIFYQRRLKSQKGLLSICEFEGKKTEIIVDGKKKIKTVGPKVCPKSSPIFQEFKIWAQLNNIEYSADSTKKTKGISLELNQMEMLFAELNWKEKMSSTDVIKLLGLKGYKLNFDIIEGNRTNAALISSLEEFFEKEGHDELNFSKLNSAQLIEDVKALMKLYDINPKIIEFDSSIEGQAIEKQPFYQLWHLLYSFEGDNSTSGIEKLRIALSEKFGFPYETNSPITNIKLSDDYSSLSTRAIRKILPYLKEGNRYDLACGLTGYNHSHSETKEDLDKKILKDQLTILAKNSLRNPVVEKILNQMINVVNSVIETYGKPDEIRVEMARELKKSAKERESATKAIRQVTDEHEKLRKELQNEFGLQNVSRNDLIRYKLYLELKDNGFKTLYSNQPIDRAKLFSSEYDIEHIIPQSKLFDDSFSNKTLELRSVNLKKDNATAIDFVATEYGETGLAQYEERVKSLFGNQIGKKSKYRKLLMSDKDIPTDFIERELRDTQYIAKKAKEILSEIVRDVATTTGSITEKLRDDWQLVDVLKELNWEKYELLGMTETFENRHGEKIKRIKDWTKRNDHRHHAMDALTVAFTKREYVKYFNNLNARSDKDGEIYKIQKTETYFDKNQKRRINPPMPMGKFRALAKEHLENTLISFKAKNKVSTKNKNITKTQTGKKTVISETPRGQLHLETVYGSSQTYSVKLEKVGASFDKEKIFKVANQKHRALLLQRLEEYGNDPKKAFTGANSLSKKPIYLNKLETYLLPETVKLVEFETVYTIRKAISPDLKIDKVIDKGAQRILQKRLIEFGGDAKKAFSNLDENPIYLNKEKGLVLKRVAISGVSNAVSLHNKRDKFGKKILDANGKPIPVDFVNTGNNHHVAIYRDEKGNLQEEVVSLFEAISRKNEGLPIIKTNHEKGWEFVFTLKQNEYFIFPNDKTGFDPHEIDLLDPTNFKKISPNLFRVQKLASKDYNFRHHLETNVEDKKELENIAFKRVRSPQNLTSLIKVRVNHLGIIVQVGDY

SEQ ID NO: 24112 - protein, 965 aa, unidentified
  REGION 1..965: note = Cas Enzyme sequence
TKERVFPDLASKQLLFEELNIKGNLTANKITELLGYKTKDWELNYKEVEGNRTSQALYEAYLQILELEGYDEDLFKIAGKDEIKLADINTSSNEIKNMVKTIFETLGIEVSILDFDAEIDGKAFEKQSSFQLWHLLHSYEGDDSNSGNETLYALLNRKFGFKKEHAQILANIIFASDYGSLSAKAMRKIFPYLKENNYSESCKLAGYNHSSSVTKEENEKRPLKGKLELLKKNSLRSPVVEKILNQMVNVVNAIIEDPSLGKPDEIRIELARELKKNSKERAEMTLNINSAKIENEKIRKLLSQEFGVKNPTRNDIIRYKLYEELKGNGYKDLYTNTYIPQEKLFSKDFDIEHIIPQAKLFDDSFSNKTIVPRQVNLDKGNQTAYDFVSGKYGAAALDEYLLRIEMMFKQKEGSISKAKYQKLLKQGKDIGDGFVERDLRETQYIAKKAKQMLEEVCRKVISTTGNVTDRLREDWGLVNVMQELNFEKYKTIGLTELVEKKDGTFKERIKDWSKRNDHRHHAMDALTIAFTKHSHIQYLNHLNARKDEDNKLHNHIIGIENKETELVIEDNGNKKRRFKQPITNFRLEAKKHLESVLISFKAKNKVVTKNKNKIKSKNGEKVKIELTPRGQLHKETVYGKLQQYVTKEEKVGAKFNEEIIKKVANKKQREALMQRLTEHAGDSKKAFTGKNSLDKNPVYLDEQKLQVVPDKVKLVFMEADFAIRKDITPDLKIDKVIDAGVRAILQKRLDEHNGNAKTAFSDLDKNPIWHNQEKGIRIKKVRISGVKNAEALHSKKDHLGNDILDANGKPNATDFVSTGNNHHVAIYRDAEGNLQEKIVSFYEAVERVNQGLPVIDKKYNESLGWEFLFTMKQNEYFVFPSPSFNPTEIDLLDARNNKLISPHLYRVQKIATKNYFFRHHLETTVEEIKELKNMAYKPQLGLSAINNTVKVRLNHIGKIVKVGEY

SEQ ID NO: 24113 - protein, 1532 aa, unidentified
  REGION 1..1532: note = Cas Enzyme sequence
MKKILGLDLGTNSIGWSLVNQDFENNNGEIIGLGSRIIPMSQEIINDFNKGASISQTASRTEYRGVRRLLERNLLRRERLHRTLNILGFLPKHFAEQIDFERKLGQFIPNSEPKLAYKGIKTTEDKIQYEFIFKKSFEEMLEDFKIHQPNLVLNEKKVPYDWTIYYLRKKALTHKIEKEELAWLLLHFNQKRGYYQLRGEEEEETPNKLVEFHSLKVVKVEDSGDKKSKDEIWYNVHLENGWIYRRTSKTPLEWVGKNKEFIVTTDLNEDGTIKKGKDGEEKRSFRAPAEDDWTLLKKKTEFDIDKSKKTVGCYIYETLLQNPNQKIKGKLVRTIERKFYKNELKQILEKQVQEHPELKDRAIYNTCIEELYENNTAHRENIKGHDFTHLFINDILFYQRPLKSKKSLISDCPFEQRAYLKDGKKEIQSLKCISKSNPLFQEFRLWQFIQNLKIYQKEKIIDGKTQSDVNVTTEFLKSDEDYTTLFDWLNERKEIDQKAFLKYPEFNLKKNIDNYRWNLVEDKVYPCNETHNSIVNRLSKVQIVPVNFLTSEKEQELWHILYSVEDKIEIEKALKTFAFKNNLSEDFADIFKKIKPFDKDYGAYSEKAIKKLLPLMRFGKYWHEEAIHSQTKNRIEKIINGEVDEKIKDRVREKAFHLNSIKNFRALPLWLTSYIVYDRHSEDSNAIQWKNPEDIEYFLKEFKQHSLRNPIVEQVITETLRVVKDIWNTYGNGTANFFDEIHIELGREMKNPADKRKDMTNKMIANENTNLRIKALLSEFLNDANYENVRPYSPSQQEILKIYEEGVLNSEIDINEDILKISKTAQPSTSELNKYKLWLEQKYRSPYTGEMIPLNKLFTPAYEIEHVIPQSRYFDDSLSNKVICEAEVNKDKDKSTAYEYIRDNHGKKIELSFGKVVTIFEEKEYEDFVKRNYSKNRSKLNKLMMEEIPESFIQRQLNDSRYISKVVKNLLSNIVREDDELETTSKHIVSSNGNITNVLKQDWGLNDVWNDIVTPRFERLNELTKSTNFGEWTNKNGKRVFQTQMPLELQKGFNKKRIDHRHHALDALIIACASKNHINYLNNQYAKSETTRYDLQKKLRRHEQIEITDKKTGEKKKINVAKEFHKPWNNFTIQAKESLENTVVSFKQNLRVINKTVNYYQKWVPDSNGDLKKEIVKQTGNNWAIRKPMHKETVSGSVSLRKIKTGASLANAIDNPEMIVDKSLRKKIKQLIKEKNDKKKIQTFFKNSQNKWDDKDVTKVDLYYFDNDNVASRTKLDESFTSKVIDENVTDTGIKKILLKHLEKYNETVGGKISEHPELAFSPDGIDELNKNIIALNNGKFHHPIQKVRTYEARGNKFNVGTTGNKKDKYVEAAKGTNLFFAIYKDETGKRNYETIPLNIVIENQKQGALQNIKPNLCSVPNKNEKGDSLLFHLSPNDLVYVATNEEFENPNLIDFNKLSKEQVNRIYKIVSFTGGRLYATPNIVANSIVDKVEFTQLNKLEFSIDSEKKSIRESCWKIKIDRLGKISTVLK

SEQ ID NO: 24114 - protein, 1235 aa, unidentified
  REGION 1..1235: note = Cas Enzyme sequence
MSKILGLDLGVSSIGWALISENNNKKEILGMGCRIVPLNTDDKDEFSSGNKISKNQKRTTKRTQRKGYDRYQLRRKMLTDVLLKNNMSDEALFNLKPLEIWGLRSKAVTEKIGLKELGRVLYHLNQKRGYKSSRADANLDKKDTDYVAEVKNRYQLIKEEGVTIGQKFYSELEQNEFYRTKQQVFPREAYIEEFDAIINQQKKHYSQVLTESLISSIRNEIIYFQRKLKSQKGLVSVCEFEGFFTKNKEGKEVFTGPKVAPKSSPLFQICKIWESINNLTINNKTGDKLKISIEKKQELFNYLDNNDRLSSNELFKILDLKKNDGWYTNKQVEKGIQGNTTKTQIINAVKDLSFNQDLLDFKLSIIDSDKETFLIDKSTGEVLESNTAKIIGAEIEQQPLYRLWHTIYSISDLQECTNALVNKFGFERAVAEKLANIDFTKQAFGNKSSKAIRKILPYLMEGYVYSDACVFAGYNHSNSLTKDENLKRQLKDKLKLLEKNSLRQPVVEKILNQMINVVNAIIYKYGKPDEIRIELARELKQSKDERNETFANLNKREKENEIISKRIVTEYNLRATRNNIIKWRLFHEINNDESKANATCIYCGKGFGITDALKGNNVDVEHIIPKSLLFDDSQSNKTLSHRICNEAKGNKTAYDYMKGKSDEEFNQYIERVNTLFKNKIIGKTKRDKLLMPQEKIPKDFIERQLRETQYIAKKSKEILEEVCRNVWSTSGSVTEYLRRIWGWDDVLMNLQMPKYRELGLTEWKEWETNNGQKHKKEVIKDWSKRDDHRHHAVDALVIACTQQGFIQRINKLSSDGNKKEMLKAVVEVKKGSSLLETYFVAQKPFNTKEVEEKAAEILISFKAGKKVATTGKRKIKRGGKKQVVQDNIIIPRGALSEESIYGKIKALDRDLKTGEIIKHKPKYLFENPDLIFKGYIKKLVEETLAQFNNDPKQALASLKKEPIYLDKEKTKILEYATCIKEEFVIKYPIESIKEKDLGYIVDKKVRDLVTERLAQFGNKEKEAFKTPLYYDKEQKQPIKSVRMFTGLTSVEPVKKDEAGNNIGYVKPGNNHHIALYINEEGNKIEHSCTFWHAVERKKYNIPVVIKNPKEVWDKILQNKEDYPQNFLEKLPNDKWMFSESLQQNEMFVFGIKQDELDIAIKQGNYKLISQNLYRIQKIGSLLSGWWFRNHIETSVSDGKEIADKKKSKRVIVIQSLENMKGTKVKIDFLGNITKI

SEQ ID NO: 24115 - protein, 1435 aa, unidentified
  REGION 1..1435: note = Cas Enzyme sequence
MKNILGLDLGTNSIGWALIERDEKLENGKILGIGSRIIPTDVELLSNYETGLAASKNGKRRQFRGSRRLKFRYKLRRERLIRAMKLLGWIDENFQPGHTIPIAQSRIDQMKQAFGITQISDDWVVYFLRHIGLNEKLEVSELARVLLHMNQRRGFKSSRKNDQSIATPSEGEEEGRKKREKKIERVTVIDVIDTKEIVKGSQVYEILLKDGRRGTTLRKIQPDWKNQTLELEITVIPPTKKDTTERLEFRLLSNSDGDQWAKQKVARQADIEESGLQFPGTYYFNQLRSEARKNSTYVIKDVTIDRSYYEKELIAILNKQLVLNPELENREILEQITVLFYPQNTEKQKELKANGLIHLFLKDIIYYQRPLKSKKSLIADCRFETKNQIDPSSGKKFALKVSPASSPVFQEFRIWQTISNIRVLHRRHHDANGRTELDKDVSDQFISTEIKERLFELFDRKERVRQKDILQLLKLDIGEYVINLYNLNEDKELPGNETKSLIRKFFKKADLLDLGETIISESENFFKLWHLLYSVDDKTQIQRSLERWYNVNTASAETISSIPAFKLSYAALSNKAMNKLLPLMRIGKYWSWDSILPSTQVRLQKILDGEFDIEITDQVRGLFIKNNLSQNLDCQGLDTPMAAYAVYGVHSERSQGIYSNPEQVVPKEPLNLRNPVVEQVVNETLRMVRDIWKTYGRPFEIHIELARELKKTRQEREKMSKAMTENEQENKRISSILKELKLGNPNSISDIERLKIWERQAGEAANATKFNVKFKRSSDPTPSEIERYKAWAQQQFISPYSGQPIPISKLFSREYDVDHIIPRSRLFDDSLENKVVVESFLNKEKGNMTALEYIKKGSTMGFVLLNEREYEEHILKFFYRKKRRLLLSEDIPDEFINRQLVDTRYIGRKISELLAPVSENQKDPIIVSNGSVTHELKANWGLSEVMKDLVKWRFERLEEKTGEKFSWYEQETDTERNPTGRKVLRLKGYEKRIDHRHHALDALVVACTTRSHIKYLNDLNKVRPSKVQNPDATTNLQLLLEPGKNGHLQSRKFRMPWNQFRHETKEALSSVIVSFHNRIRIMGRKTNRNQKYVMQPGGSLKKQLVFARDVKGNSKLSPYVRQSLHKATIFGQIQLREYKEVSLAEAFKNTSLIANAGQKKYLSAVLDKSIGDPKKAAKMYKENPLLDDSGIPFQKFMIIQFQPYATSRVDIASGFDLKRIEKIPDRMLQEELRNHISQIENENKDRTKESQIDPFGPEGIQMLNRKRKYPLKKVTTIENPGSKFPIRPGAYTESDKGTNLYFVVYENMSDPLDRQFESIPLRDVVEAKLNGESFVEERVGYRWFLLSPNDLVYMPDKGEIMNRSKVNLDSSKIYKMVSCTGRVCYFLHHSLSKVILDKVEMGSLNKEEKAIDGRMIKQYCQKISLSRLSTLNTKK

SEQ ID NO: 24116 - protein, 1514 aa, unidentified
  REGION 1..1514: note = Cas Enzyme sequence
MKKILGLDLGTNSIGWALTNNDFDNKLGSIEGLGSRIIPMSQDILGKFDSGVSISQTADRTQKRGARRLVQRFLLRRERLHRVLNILNFLPKHYSESIDFDKRFGQFKPESEEKLSFYKNQNGQNQFLFLKSHDEMLSEFKLIYPDLNKIPYDWTIYYLRKKALTEKISKEELAWLLLNFNQKRGYYQLRGEEQEANKNKLEEFHTLTVVDVIERDKGKSGIWYNVILENGWIYKRESRIPLLNWIGKQKDFIVTTELEDDGTIKLNKEKEEKRSFRSPKDDDWGLVKIRTEQTINQSKKSVGSYIYDALLKNPSQKINGKLVRTIERKFYKQELKQILKTQIPFHPELQNSDLFLQSINELYKYNEAHKNNIKNRGFDYLFLEDIIFYQRPLKSKVSLISDCSLEYRSFIKNGVLERQTIKCIARSHPLFQEFRLWQFIQNLKIYKREILDDVDISIEFLKSEEDYVKLFETLNDKKDLTQKQFLAIYKLKEDKYRWNYVEDKTYPCNETRFQFLSKTLKLEGIESSFFNNQNSEALWHILYSVTDKIEIESAIKKFTTKHNLPDNFSEAFRNLPPYKNEYGAFSSKAIKKLLPLMRMGTYWNENNIDPKTFDRINKIIDAEYDENIKNRVREKAINLTKTEHFKGLPLWLASYVVYDKHSESSDLSKWNSPADIDLFLKKDFKQHSLRNPIVEQVITETLRTVRDIWQHYGNGKPNFFHEIHIELGREMKNPAEKRKQMTNIISQNENTNLRIKAVLEELKNGGSSEVRPYSPSQQEILKIYEEGIYSNETNKDELETIDKIRRSSKPTTSEIQRYKLWLSQGYISPYTGEVIKLTDLFSTKYQIEHIFPQSRFFDDSLTNKIICESEVNSLKDNQTAMEFINKHKGEKVFLSSGKIVTVFMPETYKTHVASFFAKNRTKLKNLLSEEIPESFIQRQMNDSRYISKVVKMYLSKIVREQQNGEVEQEATSKNVISITGSITSQMKQDWGLNDVWNGIITPRFERLNTLTNSNDFGQWENKKGKKVFQTTVPDTIAKGFSKKRIDHRHHALDALVIACVNRTHINYLNNLNARDQKDKTVKHELKNKICYKTKPDSNGNYKWEFHKPWETFTQETRNQLLQTIVSFKQNTRVINKTVNKYQNYKDENGNLNFGKNGKPEKLTIKQTKGDNWAIRKPLHAETVSGKVVLKRIKQSHISITNAIGQVELLVDKDIRNQLKERIKLYPRNNEGLKKYLKSFPIMIEGKAIDKVQIYEKLDATATRKILDVTFDEKRIEKITDTGIQKILLKHLKQEIYQNAFDENGKTIAAHELAFSENGIEELNKNIINLNNGKNHQPIKKVRIFEEGGKFSLGQRGNKADKYVETAKGTNLFFAIYQDENGKRNYKTIPFNEVIERQKQGLSAALEIDENGNRLLFTLSPNDLVYLPTEDEKENLTIINFEKTSNDQILRVYKCVSFTGNRLYAIPNNIATSIVDKVEFTLLNKLEFTLDKESIKEFCLKLEVDRLGKIKRIIQ

SEQ ID NO: 24117 - protein, 1195 aa, unidentified
  REGION 1..1195: note = Cas Enzyme sequence
MKKILGLDLGTTSIGWAYIKEQDDKSEIIDLGIRIIPLSTDEKSEFSAGNAISKNQNRTSKRTQRKGFDRYQLRRTFLSDTLKTLDMLPEPNHFKLNALELYGLRDKAIREQITLTELGRVFFHLNQKRGYKSSLKEENAANKKEGEYVASVKGRYSIIKEQGTSVGQYFFRGLQSDIHYRIKEQIFPREAYIEEFDTIWNRQKTYYPEQLSESNFNKIRNEIIYYQRPLKSQKGLVSICEFEGKFRKNKEGKSVFVGPKVAPRSSPLFQVSKIWESINTIKLKGKRGQEYEITLAQKNELFNYLDNNEKLSEAELFKILKLNKEDGYAGNSMTKNGIKGNETKSSINKIIKGLSNAKNLLKFDLTESTKYIIDYSTGEETERLMIDASFEKEPFYQLWHSIYSITNDNDLIKALATKFNIPDEEAKQLAKLNFTKQGFSGKSAKVIRKTLPFLQSGFMYSYAMEYAGYNHSNSLTTAQNEARILLEKLPQLQKNSLRQPVVEKILNQMINVVNAIINEYGKPDEIRVELARELKSSKDERNTADKNNRARESENKKIAERLENDYGVKANKRNLDKYKMYVEVDGISLYTGKTIDLATFLRGEQVDVEHILPKSRIFDDSLQNKTICEQQENRNKGNLTAYDYMKTKSESQFNDYIERVEGLFKLRKISKAKRDKLLTPASKIPDDFIERQLRQTQYIAKKSTELLKDVCYNVWATSGQVTDYLRHQWGWDEVLMNLKIEMYKSKGYTDLIEIYEVQDNGQVKTKERIKGWTKRDDHRHHAIDALTIACTKQGIIQRLNKLNQEVIKREGENKTDALKAETSLKDYIIGQKPFTTKQVEDKAANILISFKAGKKAASTGTRKVKINGKKQVVQKNIIIPRGALSEESIYGKIKTIEKNVPINKLFENPDLIVKHNIKMLVYERLNEQSGDVKKAISSIKKNPIVLDKDKELLLTYASIYKEEFVIKYNVNSIQQKDLQFVVDEKVKEILTERLANSNNNTKEAFKDLETNPVWFNKEKGIKIKTVRLKTGLGNLVPLHASTDGKTHGISKDSVKLLDYVKPGNNHHLSIFEDENGKYHDLMTTFWEAVERKKQGLPIIRTEHPEGYKFVMSLQQNEMVTYNTPDNGQEPMSSKLYRVQKMSKKSDGALDVMFRHHLETNLIDNSIAKQTERYLYIRSVGGLKPFEKIKINLLGR

SEQ ID NO: 24118 - protein, 1294 aa, unidentified
  REGION 1..1294: note = Cas Enzyme sequence
MKKILGLDLGTNSIGWALIEAGENNDPQSIIAMGSRIIPLDADARDQFQKGQAISKNKDRTITRTQRKGYDRKQLKKSDLKKILTQLNIAPSEELLKLPMLDLWKLRNDAVSVNKTITPMELGRVLYMLNQKRGYKSARSEANADKKDTDYVAEVKGRYAQLKDKNKTVGQYFYDELSASNQSHAYFRVKEKVYPREAYIEEFDAIVNVQKTKHSFLTDEVIHTLRNEIIYYQRKLKSQKSLVSVCEFEGFETTYYDKKTQNNETIFTGPKVAPKTSPLFQLCKIWETVNNISLKIKNPKNSKYKWGDRIPTIEEKQKIVNHLSTNENLSFTDLINILGLKKEEVYANKQIQKGIQGNITYAAIHKIIGNNKYLEFNVQTKPSKHLAILIDKTTGEILDERESIEIDSAIEQEPFYQLWHTIYSIKELDECKNALIKRFGFNDEIATKLSQIDFSKQAFGNKSNKAIRKMLPYLMLGYNLSESESFAGYNRRLTKEEKIKNVIDAPLKLLVKNSLRQPVVEKIINQMINVVNSIIDQHGKPNEIRIELARELKQSKDERENSDKQNRFNKTINDLIEAKLTELGLPNTKRYIQKYKFIFPAKDKNWKEAQVVNQCIYCGESFNLTEALSGDNFDVDHIVPKALLFDDSQTNKVLVHRSCNSTKTNQTAYDYISKKGNEVLNEYITRLDDWFRRGIISYGKMQRLKVSFEEYQERKKLKKETEADKKIWENFIDRQLRETAYIARKAKEILEKVCPNVNSTEGNVTAKLRELWGWDDVLMNLQLAKYKDIGQTQIKEWTSDHGKRLHKKEEIINWTKRDDHRHHAIDALVIACTQQGFIQRINTLSSSETKDEMQKEIDAAKKKFGNNYDEKILSEKNEIVKGYKEKNNQLNAYLISQRPEKFTTKYIEQEADKVLVSFKAGKKVATISKYKATGKNLETGVIVPRGPLHEQFVYGKIKIIDKDKSVKYLFENSSLITNKEVKSLVERRLQESNNNIRETLTALKKNPIYLDKEQKVILEKADCYKQESVIKYKVQDLKAKDIPFIVDKKIQETIQKRLDLFKGKEKEAFKDPILLPIGTKGKSKEKRYEDGKTVPILTVRCFTRLTAVEAIKKDENGREIGFAKTGNNHHIGIYKDAEGKLIQHLCTFWHAVERKKNKVPCIIKNTNTLWNDLLDKELPQSFLEKLPSDNLELQYSLQENEMFILGMQKEDFDLAITQNNYSLLSKKLYIVWSISFNKYWFRHHLETKNSELKKTNGARETNRYIEISSVDGFQKFNPIKVRLNHLGEIKKIGE

SEQ ID NO: 24119 - protein, 1512 aa, unidentified
  REGION 1..1512: note = Cas Enzyme sequence
MKKILGLDLGTNSIGWALIEKDTENNQGRIINIGSRIIPMGAEVSNFEQGNPQTKNADRRTARGIRRMGKRYKARRNKLLYILSKMSILPEQFKFSTPFDNPLKIQKVNLLPIKRGTSQLTALELLQLKVKALKGPIELQELGKIIFTYNQLRGYAGAGNDEEDVKDESANENEETDFLKYEKIVAIVKIINEPLKQQAKKKGKEVFDIEIEYDGEVLKGETVLNTLKKNEEVELQIIIRRDKKGNVSSINLTMPIKTNWRKSMEELEEELNKLTEQKGEEAYLCEYFLSKLSADKNYKLRNKVILRKRYQAEFDAIWNAQLKHNPIFKSIVENKETLRSITDFVFPGNNAEKKQADYRNTAIEKGLKYLIKDQIIYYQRDLKDQSDLIGFCRYEKDQRVVAKSHPIFQEFKVWEQINKLSINTKTQNGFTKKGEPKYEYNDVPLSANYKQWLFDELQKKKEVSGKGFYAKLEKEGAIIKNESFLNGIHRDVKFKGNETYLFLKSQLKEWFDKLGLNDTNVLVSFWDILYNTKGNEYDLDSERCKAIKKFIVSKSAEVGDIDKLTVRFAKIKFARNYGSLSLKAIENMLPLMRAGKYFNEELPQNINDNLLKILNENQEDPFLKAVEQELEDYKEILLTEGGMKPSYAAILVYGKHTAESFSGENIQSPKDIKPIPQGELRNPLAEQLINEAIKMVAEIWSANGEKPDEVRVELARELKNSADERNKIYKANDANRKVNERVKQRLRELNKETSLGNIERYRLWSSQASEPFPVPIKPSEPTKSEIETMRLWEEQKCLSPYTKQPIPLSKLFDKGLYDRDHIIPKSRYFDDSLSNKVVAETRVNRDKGNRTALEYFESGSTTITNLLSKDQFTEYVNENFFGKKRKNLLATKIPQDPVARQLKDTQYIATRVREEISKIVGSDNVKTTTGGITDYLRNHWGVNEKFKEIVLDRYKKARPFFAEIEFKKYEKEYEAKKKEYERNEMPFDEPFIEKSNFISEFNKEFIKKEDNKLKIKGWTKRLDHRHHAMDALIIACTEQAHIQRLNNLNKELQTELAKNKELIKKGFEGTDEELLAEFVNLGEKERKEILEKLPSFRTFTHPWATFSDDAKNKLETIIVSHKPKEKLLIQKVEKGEDAGKKDALRIRGKLHDATLYGLSEGKESYRIKLTKLAGKQFATEKTIEKIIDPLIKESIKNHLENYKGNKAEAFSAEGISELNKNRAVPVYGFKIYYKEQSEKYGLKKIAGKKSTQDSFNDILNRMIDEDLKNKLISHIDTKGGDFKEAFSETGIKELNQKLEEDYKLKNQNKSFKAITSIKLKPLKSDGEEEEIDLSLLPLERKSSYNNKLMVATGSNYAFVVLEKEGKRHYDEISFFDATRLVNNAFKKGFKDVQKIITNHFEGKHTGSKILFTLKQNEMVYLPQKNENVITDNNHADFTAFWNDKKSRSKNVYTIVKFSGKQIYFLKHDIANALVNKVEFGSQNCYEIIDGISIKEHCIKLHIDRLGNIKPIL

SEQ ID NO: 24120 - protein, 1116 aa, unidentified
  REGION 1..1116: note = Cas Enzyme sequence
LVKDSNGNQVVKPLKCIAKSNPIFQEFRLLQFVKNLKIYKKEIVNDVDVTNIYLKTEEDLVELFNWLNDKAEISQKQFLAYPKFKLKEDKYRWNFVEDKIYPCNETRNQFLNAIAKIDVDKSFFDTKNAQDLWHILYSVTDKIEITKAITTFAKRHNLPDKFIANFSKLKPYKRDYGSYSEKAIKKLLPLMRFGSYWKESNIDIKTFARIDKIQTGEFDENMRTRVREKAIHLSKTTDFQGLPLWLASYIIYDRHSEASDVSKWKTPADIAWFLNPKNKSGFKQHSLRNPIVEQVITETLRVVKDIWQHYGEGKENFFNEIHIELGREMKNNAADRKRITDNINQNENTNLRIKAILTELKNDGVNDVRPYSPSQQEILKIYEEGVYSSEIKKEKLEEIDKIRKNAKPTPSEIIKYKLWLEQGYISPYTGKLIPLSELFTTKYQIEHIIPQSRLFDDSLSNKVICESEVNELKSNMTALEFIQKNEDRIVTLTGGKTVKIFTKDAYRKYITAYYNKNKNKQKRLLSEEIPEKFIERQLNDTKYISKIIKNLLSKIVREDDEQEVTSKHIVSLNGSITSRMKQDWGLNDVWNNIITPRFERLNALTNSSDFGKIELKKDEFGNKGKQVFQTTVPDALAKGFTKKRIDHRHHALDALVIACVTKDHINYLNSINSERTNYSLVSKLRRTEEIVINEKKQKIAKEFHKPWDNFTKKAEDQLDRTIISFKQNTRVINKTVNKYQAWKEEDGAMKKVTLKQTKGDNWAIRKPMHAETVSGKVFLKRIKQSHITIANAIEQIELIVDKEVKKQLTEKIKQYPNNLVGLKKHLKAFPVMIDGKTIDKVQVYETIEATATRKTLDNSFDEKKIEKITDTGIQKILLTHLKQEMYQNAMDENGKKIPAHEIAFSENGLEELNKNLTALNNGKKHQPIKKVRVFEEGGKFSLGNTGNKTTKYVEAAKGTNLFFAIYQDEKGKRNYKTIPFNEVIERQKQGLSAAQETDENGNRLLFTLSPNDLVYIPTEDEKENLTTVNFDKLSKEQTERIYKFVSCTGGEGHFVFNNYSKEIISNENGSNNKNERMLDFKNSNTIYDEKEKPIMIKSVCWKLEIDRLGKIKKIIR

SEQ ID NO: 24121 - protein, 1386 aa, unidentified
  REGION 1..1386: note = Cas Enzyme sequence
MKKILGLDLGTNSIGWALVNEAENEKERSEIIKLGVRVNPLTVDEQQNFEKGKSITTNADRTLKRSMRRNLQRYKLRKENLIEILKEKEFIKYETLLSENGNKSTFETYKLRSKAASEKITLEQFSRVLLMINKKRGYKSSRKAKSQDEGQLIDGMEIAKKLYNENITPGQFVLELLKENKKYIPDFYRSDLQAEFDKIFDKQLSFHPKYLSFELKEELRSKKRDAVWAICAKTFKEKGFELVGIKRQGKAIEQKIENYQWRVKGLTDKLDLEQLVVLIQQINSQINNSSGYLGSISDRSKELYFNKETVGQYLMRQLDENPHTRLKNQVFYRQDYLDEFNTIWEVQAKFHRELTNELKTEIRDVIIFYQRRLKSQKGLVSICEFENRQIEVTIEGKKKIKTIGNKVCPKSSPLFQEFKIWQILNNIQLIEKSNGAKRELAQEEKELLFKELNIKDKLSKGDALKLLFENHKDLDFNFKDLEGNRTNASLFRAYQTIIELSGHGEYDFGKHGADQVVEITKSVFEGLGYNTAILSFNTNLNGDAFEKQPSYQLWHLLYSFEGDNTVTGTGNLIQKLTANYGFEKEYATVLSNISFQPDYGSLSTKAIRKILPHLKEGNEFSVACTLAGYKHSKDSLTKDEKERKVLKNKLDILPKNSLRNPVVEKILNQMINVVNTAIDNYGKPDEIRIELARELKKSAKEREELTAAISKSTTEHEKYRALLQKEFGLKHVSRNDIIRYKLYLELEHNGFKTLYSNIYIEPHKLFSKEFDIEHIIPQSRLFDDSFSNKTLETRSVNIEKGNDTAYDYVKQKNDEKAFAEYLKRLEDLYKAEKITKTKYNKLRMTGKDIPDNFIARDLRDTQYIAKKAKSILEKLVKDVVSTSGMVTDRLREDWELINVMQELNWDKYNKLGLTEVIENREGHKIKRIKDWTKRNDHRHHAMDALTIAFTKRSHIQYLNNLNARSDKSGSIYGIETKELYRDDKNKLRFKPPIPLDDFRAEAKKHLENTLVSIKAKNKVTTININTTKKQGGLNKKKQLTPRGQLHLETVYGSIKQYVTKEEKVGANFNEEIILTVSNEKCREALLKRLKEFDNDPKKAFTGKNSLDKNPLYFDESQTFKIPLKVKTVRFETIYTIRKDITPDLKLDKVIDPKIKTVLENRLKEYGGDRKKAFVNLDENPIWLNKEKGIAIKRVAITGITNALALHDKKDKEGKIMLNKDGSKISVDFVDTGSNHHIAIYKDENGNIQENVISFFEATTRVNLGLPIIDKSYKEKEGWTFLYTMKKNEYFIFPNEITGFNPSEINLLDKSNYHLISPNLYRAQSVSSKYYIFNHHLETSAANGDTFKNKKQLSGITYRFIQSLPHIKDIIKVRINHIGEIVSVGEY

SEQ ID NO: 24122 - protein, 1080 aa, unidentified
  REGION 1..1080: note = Cas Enzyme sequence
MARTLGLDIGTNSIGWCLVEDGKEIIGMGSRIFPVGVKEDSYAKSGTEESRNAARRAARSIRRGYDRYHQRRNELERILTERGMMFDKTVSIPTKELYGLRRKALDHALTLQEMGRILFLLNQRRGFKSNRKDAGKSGEAEKELTGMKAAMSELEVKVKASGSRTVGGYFASLFDNQPENWHNPNEPVERIRRRFVNRKMYEQEFELIWETQRQHHPGVLTDELKTEIRDRVIFFQRRLKSAKHLVSKCRFEPEKRVMPKSHPLFQEFRLWQRLNDIRITIENTDRVNSFLTNDECATLTAELGGSRSMTLPAVKKLMGWPKSTKFNDIGEKIVGCTTVAAIKEAVGEDWYFKQTPERRLQLWHTLYFATDDGWVERYAQEKLGMNDEQAIRFAEVKLEQDYGSISYKAASKILPYLVEGYDFAGACVKAGYHHSQNELDAADRPLDNKVNTAKVEPLRNPLVQMTVNETARLVNAIIEEHGKPDLVRVELLRELKKPKAVREKMRNRMRDKEKQRDEYRDFLKAKGIIADPRMSDIKKFELWLELEYSEDNLSKLDPHVDLRAFAKFAEAVNSKDREKFYLWLECERISPYTGNPIPLHKLFSEAIHVEHILPYSRSLDDSFANKTLCEDAVNDEKGNLTPLEYFEQKRAPAELKAFKQRIQNFSQGKLDKFLATDVKDDFLNSQLTNSAYMGTEVRKLLRTVFKDVRVTNGQLTGLLRRVWKLNELLNVGEDRKNRDDHRHHAVDALVIACTSQRLVQRISTESQFDYRGNQRVPDIGVPWNVFRADAAEHLNGMLVSYKGGKRLLSTKKNKYIQSKAHEGKPEKHQRTKAVRGPLHEETLYGRITITGRGEKHETYVVRKALSSLTDVKQLDLIVDPVVQRVVKEHVAAHNGKLKDAMKESVFMPVKPGKEGLQVPIKSVRLRVNTEEMVELRPKTYVEPGSNYCIAIYEDVKGKRAYRTISFLKASQLALRKEPLYPAEIEGKKLLMTLQQRDLVVLYNDHPDEIQWNSPSWMAQHVYMVKKFDRNGNINMVLHNATNVNTDYPKRYPAGTTYKKSSGSIRAVPVKVDMLGGYKRR

SEQ ID NO: 24123 - protein, 1409 aa, unidentified
  REGION 1..1409: note = Cas Enzyme sequence
MEKILGIDLGTNSIGWAIRNPQISENQIENYGVIVYKKGIGEEKGVEYSFAAERTKNRSLRRRYQAHKYKLWATLEILIRHKFCPLTIDELNEWRKYKKGIGRKYPVNNNEFNNWIKLDFNNDCKPDYISPYQLRLELVQNKLDINQEINKYKIGRAIYHIAQHRGFKSSKKILENEESGNESDLVGAEKKRAEFIENLLVKHQVKTVGAALAKEESNGVRIRSNLFQYVLRKQLQNEVKEIFNCQSISFNEMFNKEISKSTIFWQRPLRSQKGTIGKCTLEPNKFRCPVSHPFFEAFRAWSFLNTIEYKLINGNENKWNKIPLELRNLLFKEKFMRSKDFDFIDLKNFIHKTNQHKNWEFNYKDNTNVSACPVSASLRDIFGENWEAYTKKHLPFEKRKSNKNYYDIFDIWHVLFSFEDEDDIRSFIVNKLELPDKVEKFVALWYKMPIAYGMLSLKAINNILPFLKEGLIYTEAVILAKIPSILGDEMWLSNESKIKKDIKNIIEQNRDAKKKIVIVNSLIAKYKSLDNQYKFAERDYDYQLKEDDKKNVVIECNEFYGKESFNLLPNKNDIIIFVQNQYQSFFYDKKREFKKQPHLLDSLKTILSDTFILSEKQLNKLYHPSQITIYPPAKETFYETHNKHMTLLGSPATGAFKNPMAMRTLFELKKLVNHLIITDQIDENTKVVVEVARELNDANMRAAIEKYQRFRQEENKEFANAIVELLNEIPSLKADPNNDEDIDKFRLWFEQLKEGEPSEGFSNDWLNNKSKVYKEINSAKEMIEKYRLWKEQECQCIYTGRFIGITDLFSENNTDFEHTIPRSMSFDNSFANLTICDFVYNRTIKKNNIPTALLNYDDDVIISDKKYSAIKPRLYKWEKKVENIKKNIEFWNKKSKSASTKEFKDKAIQQRHLWRFELDYWQNKLNRFTLKEVKSGFKNSQLIDTQIISKYAYHYLKSVFYTVRVQKGAITAEFRKIYGIQPKNQKKNRDFHSHHAKDAAILTLIPTDAKRDEILKEAFLFHEKSRKQYTIKPYNGFKNYFIENIDQTILINNSIKDNALTPGRKRVRIRGKKIFLRTNLGELKKDDLGNDIEKWAKGDSIRGKLHLESFYGKIKLVKRDEHLKPIKNKAGEWEYEDKNEGFAFVIRKEVNKELKVDTIVDLFIKQMFIKQMNGRNIEKTIKEDGGIWMINKCGEKLHKIRHIRCFANDVAEPLAIKKQTYESSKDYKNNFWAKNGENYAYILYQGVVNNKIERKFKLLNLFDAAKIYQLNNYNELSVELEIDTNKKGNKLPLHFILKTGLKVLFYKENNPEELFDLENTDLSKRLYKILKFEKDGRIVFGYHLDARSDNDLKALSDIHGKSIYNGFSNIDFENPMPKLKLSPGNFNFLIENKDFFMKPDGKIYFNNKG

SEQ ID NO: 24124 - protein, 948 aa, unidentified
  REGION 1..948: note = Cas Enzyme sequence
EDFADIFKKIKPFDKDYGAYSEKAIKKLLPLMRFGKYWHEEAIHSQTKNRIEKIINGEVDEKIKDRVREKAFHLNSIKNFRALPLWLTSYIVYDRHSEDSNAIQWKNPEDIEYFLKEFKQHSLRNPIVEQVITETLRVVKDIWNTYGNGTANFFDEIHIELGREMKNPADKRKDMTNKMIANENTNLRIKALLSEFLNDANYENVRPYSPSQQEILKIYEEGVLNSEIDINEDILKISKTAQPSTSELNKYKLWLEQKYRSPYTGEMIPLNKLFTPAYEIEHVIPQSRYFDDSLSNKVICEAEVNKDKDKSTAYEYIRDNHGKKIELSFGKVVTIFEEKEYEDFVKRNYSKNRSKLNKLMMEEIPESFIQRQLNDSRYISKVVKNLLSNIVREDDELETTSKHIVSSNGNITNVLKQDWGLNDVWNDIVTPRFERLNELTKSTNFGEWTNKNGKRVFQTQMPLELQKGFNKKRIDHRHHALDALIIACASKNHINYLNNQYAKSETTRYDLQKKLRRHEQIEITDKKTGEKKKINVAKEFHKPWNNFTIQAKESLENTVVSFKQNLRVINKTVNYYQKWVPDSNGDLKKEIVKQTGNNWAIRKPMHKETVSGSVSLRKIKTGASLANAIDNPEMIVDKSLRKKIKQLIKEKNDKKKIQTFFKNSQNKWDDKDVTKVDLYYFDNDNVASRTKLDESFTSKVIDENVTDTGIKKILLKHLEKYNETVGGKISEHPELAFSPDGIDELNKNIIALNNGKFHHPIQKVRTYEARGNKFNVGTTGNKKDKYVEAAKGTNLFFAIYKDETGKRNYETIPLNIVIENQKQGALQNIKPNLCSVPNKNEKGDSLLFHLSPNDLVYVATNEEFENPNLIDFNKLSKEQVNRIYKIVSFTGGRLYATPNIVANSIVDKVEFTQLNKLEFSIDSEKKSIRESCWKIKIDRLGKISTVLK

SEQ ID NO: 24125 - protein, 1296 aa, unidentified
  REGION 1..1296: note = Cas Enzyme sequence
MSKFILGLDIGTNSIGWVLLRENKIFDKGIIIFPIGTNVDKNGIETTKNKKRGTYRRASRNHNRFKLRRKNLKRLLTSLNIIPSFENTYKVKKKYQAAEFYNIRAKALDKKIPAEEIGRIFLLINKHRGFKSNSKTLSENKDDEGVVKEDINNLAASMKKNEARTLGEYFHKMYQKSAQFYNDDNWHNIDEPIDERAIDNDGILWLQNNRGIRREGRFVGREMYATEFDLIWDEQKNHYPQLTGSRKEYDEICKLSCEEKRKQIKSFKSTNYWKIKHETIFFQRQLKSQKKFIGKCQFEKNKRTAPVSSLLFQEFRIWKQLADIRYSDKENDILKQPLPHEWKQKIVDYLETSRTLNLREGRKKDDGSRNKDVLDVIGITNKKSFSFNFETDEEDKYFHGNKTLFAIYSACGEEIYKKLKSENKLEKLWHILYMAKDDEWLLDTLTWKWKFDEIIAKRLVEMGLEEGFANYSSKVIEKILPHMKNGKDEHDALILANYILASDEYKEIRVLSKKIKQLANNELRNPVVEKAVGETIRLVNTLLKTHDIDQEHFTIRVESTREFKKPKKERENIRRSNLEKEKRREEYASFLNEKKSKGELNFIRDIKKNDSIINKFELWLELGADKNDPEFKEFEKIVERKDREKHTLWLDCNRICPYTGNPIPLSKLFSPEIEIEHIIPYSWSLDDSFTNKTLTFHHINKEKANKSAYEYMKSKGETALKEYEIRVKSNNQYSKEKLEGRFLNINPEQTFTNAQGRNASYIAVYVRKKLQEVCRNVQFTNGFATGELRKNDWRLGNLLDKVKYQEQTGKDIDRIIREFSNYRKDYEYYLKRNAASTDIKKPDWKNLTPEITAAYEAETKNPIYEWWQELQYFEAFRGEKGKKDRSDHRHHLLDAIVIGMCSPAIIQRLSTLNQLREIQGISLYDEKGELTRERIDLPIPYLEIKETLKSVLVYHKAEQRLITAKQNRIRKTKHSVTDTSIIKQRTISPRGSLVGDNFYGKLKNPLHQGFTKDDVYVKRVSVNGVNFKDKNALDKIVDKNLKKILELRLEKYGDKGEKAFSEEALLSNPLLIYSTKKYPNGLPDNPLSKKGMPLPVIKKIRVANKNSRNLIQLVAKDEENNIATSNRYAEADGNYLMALYERKETDKKGKVKIKRDFEIVSFFKAVERRRKGEKLFKDEKEQKDGTFLPLMKSCPYLKAGDFVVMYENDESEINWNSKEDLIKRLYFIAELNRQVNVDKKTGNENEFGVIKLNRHNSQKTSANSYITDGPFIKILHTGLRAVKVEINRLGVIKTIL

SEQ ID NO: 24126 - protein, 1046 aa, unidentified
  REGION 1..1046: note = Cas Enzyme sequence
RIKQLQNELGTKTIGQHLYDELCASNNGVDVLLRERTYLRASYVEEFDRIWDAQKKHHPALLSGGPQEDNNKGSLYDKIRNRILFYQRPLRSQKDLISSCTFEPNNRVAPKSSPYFEWFRIWQKLNDLEWKTPDGLRFKPSMEQKQALFNELFYNTSSDKAVLKITAIKNCLGFKKSDKIYLNFEELDGSRTYAMLRDALEQAEITDVHERLFFNPEVSDEQGGLMEWWHLTYSIPNEADLIRSLANRMHITKEQAKIITKKTAYKPDYGSLSTRAIKKLLPHLLNGLGYSEACDAVGYDHSGYKTKQELKEKLSLLMPNALRNPVVEQILNQMVNMVNLAIDEYGPFDEIRVELARELKNNAKKRNQIEKQQNSNKKKNEDITKELKNSYGFKVVSKKDIQRYTVWNETENQCLYCNNPISNTEFLNGLADIEHIIPRSRSFSDNINNFILAHRKCNRDKNQHTAYDFMEQKGENVLKEYIEKVNRLYDNGKGSISRLKFQNLLARGNEIPDDMVDRMKNDTQYISREAVKILKGICENVHTTTGQITDYLRMEWGLNDVLKELMIDTYRAANETEWKEIKDRSGNIIQKETIKNWTKRDDHRHHAVDALICALTDAKIIFKLNNLNKIYQYERDMLSPSEIKAMEDALSEETGEKTSFNLKQFISERSNTDAPIPNLREEAKKHLAGLFISFKKSSKVFSKNVNRPKKGLPQITWTPRSHLHEETVMRKVLTPGDKPVSLNKKFDIAWVDQIVNNKEREAVKQHLATFNNDPELAFDKKTLKQSPLEVNGKALEKVTLFEEVLSKRVPISTGITTAQMGKIADGQVKTLLEQRMNAYGNDPKKAFADISNNPIWLNRDKGIQIKSFRTLENAKAQKVREGYVQTKGNHHALIYCNNEGIYTDVVVSFWEAVNLGLTNIKEKGHPYPIIQREDHPEYGRLVFTMQINDLFVLDLKHSKNPKNDDEINFLDINNRELLSKKTFRLQKMSKKSNGAIDIVLRQQYETSINREIKEITLLNFQSISHFKRLTKIVVNALGQIRLDNTW

SEQ ID NO: 24127 - protein, 1370 aa, unidentified
  REGION 1..1370: note = Cas Enzyme sequence
MEKILGLDLGTNSIGWAIREINNDLENQIIDKGVLTFDKGVAEDKSGEHPMVQKRTEARGKRRNYQSEKYRKWELLECLINEGMCPLTIEELNEWRHYTKGFGRRYPQSEKFIQWLRFDFDGDGKPDFERLGYSKHESYYLFRSLIIDESKIDIFKREPHIIGRILYQLVQRRGYNDGQNIDENEKDELSKTIKKGGGDSGAVGADEIEPFIAKYKTLGAALYEVQKQNNVRIRKRYNLRSQLDKELQAICNIQGLEHLYKALWGAIIWQRPLRSQKGLVGVCTFEQNKRRCPISHPLYEEYRTWVFINNLKIKPIIKNDISINKIELNEALHKVVYPQFFKAASDFKLFSIAKELEKVGFEITAKFPSDTKVISFSFLYKMKEIFGEEWSTILEWNELIYNEPKKHSYNIEDLWHLHFTKTTNKKTGEEPFDFLKRFVNEKLKLSDDKAEVFAKIRLQQGYATLSLSAIKKILPYLQKGFIYSEAVYLANLHKVLGLKNLTEEDTNNYAKFIREIISNFKYEQKKVAIINSLIAVYFEDVKNFEQNKNDLIGKTISENFGEFFWNALPTQKALNILNDITDEINLFLSKPKWKAENHFIKAGRLHEKIFVALMNETGISANNIKYLWHPSEQESYLPAIANDGKYYLGSPEPISKGFKNPMALKTMHKLKKLINYLIRVGKIEPDTRIVIEIARELNDANKRKAIERWQRDREKENENYKKQILEINKECNTNFNEQDKNLIDKIRLWEEQKRQCLYTGKTIGLKEILDGSKYDFEHSIPASMSFDNELKNLTIADKKYNQQIKGKKLPSECPNYKSDYTLNGVDYPAILNTMQILFGKMKEVEKKVKGRIITVRRFEKIENLENQFEEWRAKKSDDKEIKDNIIQRRHLIKMELDYWRKKLQSFTVTEYKAGWRNSQLKDTQTITKYALPYLKTVFNKVEVQKGNITSDFRKIYKIQPRFEKKERTKHSHHALDAAVLTLIPTAAFRDKILLNYNEAKENNKGYHEQPKQWTGFKADHILSIEDDVLINYQAQHRTLTPTYKTVRKRGEVQYVKEKLADGKWQYKTDETGNKIPLLAKGVSIRGQLHKESFFGAIKNKGELNLVERYPISSFTSINDCKHIVDDKVKELVQNELQKRMDEGLSFDKAKLEPIPFHKGNAVIIKVRCKVAAGRGYLTPGKAVEIHMHNSVSKQEYKNVIYAQNNENTFCLYYELETNNKIERAFRIVGLFELAKLGLKNETDLFNDNYYKSIEGGKGKNKINLPLQNILKVGTKVIFYKDSIEELKEISKDLLLKRVFRIYKFNEMGSAFLYLQNHLEARANDKLSDGENSFLNDIYYPRLKMVSNNFICAIEGKHFEIKPDGEIEWLF

SEQ ID NO: 24128 - protein, 1161 aa, unidentified
  REGION 1..1161: note = Cas Enzyme sequence
MPASKKILGLDLGTTSIGWSFIELMDEKPVFVKSGVRIIPLTVDERDAFNSGNAISTNADRRMKRGARKTLDRYQLRREKLIRYFLKAGWIEDRSVLQKLESWKIWELRNLAATSQISMQDLCAVLLHLNTKRGFKSNRKTDSAEETASDFIEGISANDRMVLELGYTIGQWYWNEHSEARAQNAPMPAFRGKTFSRKLHREEFDRIWAVQAKFHPELTEEAKVDLGDRTIYYQRRLKSAKHLVGKCPFFPSKRVIPASHPLFQLYRAWHEVNNLRLYHSQHNTLFEIPLELKEQLVEQLHEVKKLTAAAIIKTAAKFHGVTTRQMKASVEAIPGMETRISVETLFRAWGVKRPELLDFDPLVEGQDFDKQPALLFWHVLYSVEDTDDLREVLHTRYGFTVEQSEALAKVRLREGHGSLSARFIRRLMPFLMEGNDYTTACSLAGYRHSFHQNKEESEKRMLLDALPPVKRGDLRNPVVEKVLNQLVNVTNAILAHPEMGRPDEIHVEMGRELTASAKQRKGMERSIKDNQILNQQAAEELEKLGLRQISRKDIIKWRLGEECNWISLYTGKPIDRASVFRTDAYDVEHIIPRSRLFDDSLSNKTLCESELNRKKGNMTAYDFMERQGEIALESYLERVNSLYNAHGIKKGKYLKLIMKLEEIPNDFISRQLNETQYIAREALTRLKVVTREVLPTVGSLTAHLRHEWGLDDVIKELQIPKYQESGMTTVRTDKGGNQHVDIEGWTKRDDHRHHALDAFVVALTSRKLVKRANELSQSMGGYDEADVTGRLNRKERLFTAPDFDVRRLASEAMAQVLIAYKSGQRVASWSKNTIKVKGGYKTQRQLIPRGPLHKETVLGKRLQYSPKPIALKDIANPEWIVNTEERAAFESYLNANGGDPKLAFSTKNLKKEPFLVLGKEQVALTCWETRFTKRVAINEKLKVADVVDGAVRKVLQARLEAYDNSPKKAFADLEANPIWLNQAKGIFVEKVTVFDGASDLLPLHENAQGMPVDYVYTRNNHHLALYQKPDGKYHLEAVTLLEAVQRKQQGMDLIRKNHPEGYRFIVHFERNHYFYFGERGTDVSPSEPGILDRIFRTQKMTLNNAGGPDIFFRHNHETDIQRENQFSFKRSGSIGNLPSHAVEFNVLGEILNIKPILYTID

SEQ ID NO: 24129 - protein, 1494 aa, unidentified
  REGION 1..1494: note = Cas Enzyme sequence
MKKILGLDLGTNSIGWALVDQNFEEKQGNILGLGSRIIPMSQDIMGEFDRGNSISQTAERTGFRGVRRLRERHLQRRERLHRILNVLGFLPKHYSDKIDFGKRLGKFLPETETKLVYNERNEFIFKNSFEEMLHDFQRSQPDLVSNGRKVPLDWTIYYLRQKALTSKIEKEELAWLLLHFNQKRGYYQLRGEEEEENQNKLVEFHSLKVVDVKADEPQKGRPGIWYSIILENGWIYRRASKNPLFDWNNKMKDFIVTTDLNEDKTVKTDKEGNEKRSFRAPSEDDWTLLKKKTESEIEKTRGTVGQFIYNTLLANPNQKIKGKLIRTIERKFYKEELNLIVRKQVEFHPELKNTDVYNACIEELYPHNESHKNSLLNKDFVHLFIEDILFYQRPLRSQKSLISNCPFEYRSYIVEGIQKSESIKCVSKSHPIYQEFRLWQWIQNLKIYDRKTDENVTSEYLFSEEDYVRLFNFLNERKEVEPKMLLKHFKISEKSHRWNFVEDKPYPCNETHSMIKSRLEKVEDISPDFLTPEIEEKLWHLIYSVNDKIEYEKALKSFALKYNLHPESVLENFRKFPPFKNEYGAYSLKAVKKLLPLMRLGKYWNSENIDDKTKVRIQHLLTGEYDESIRERVRDKAIKLITESDFKGLPLWLASYIVYDRHSENAETGRWNTVKDLENYLAAFRQHSLRNPIVEQVITETLRVVKDIWNQFGNGEKDFFKEIHIELGREMKNPADKRKQMTERNTGNENTNLRIKALLMEMLNDSNVENVRPYSPIQLEILKIYEEGVLNSDIEIPEEIEKISKLSQPSGSDLMRYKLWLEQRYRSPYTGETIPLNKLFTPAYEIEHIIPQSRYFDDSLSNKVICEAAVNKEKTNQTGLEFIKNHHGQIVETGSGKKVRIFSEDEYQEFVKQHYNKNRGKRNKLLLDDIPEKMIERQMNDTRYISKFVMQLLSNMVREETSKDDGVNSKNVLASNGQITSVLKNDWGLNDVWNDLILPRFERLNELTHSQNFTTYNERYQKYLPQVPFELQKGFQKKRIDHRHHAMDALVIACATRNHINYLNNQNALDKKKSKEQKQVAREDLRAVLCDKKYNDGSNSNYQWVFKQPWETFVVDAMQKLETTLVSFKQNLRVINKTINKHEKYVDKDGRWLKEKVEQTIGESWAIRKSMHKDTVAGHVNLRDRKIVNLPAAIDKWEVLVDKNLKTKIKQLINEGFDKKKIVRFFSDLEYKWMNKDVSKPELYYFSDEKEMLVASRVNLDVTFNEEKIKSITDTGIQKILLEHLGQKQNNPEIAFSPEGIEELNQNLTFLNDGKPHQSVYKVRTFEPKGNKFSVGQSGNKKDKYVEAAKGTNLFFAIYQDENGKRSYETIPLNIVIERQKQGLAPCPEENSDGLPLLFYLSPNDLVYMPEMEERDNLQPIEFQKLKKKQAQNVYKMVSSSGTQCFFVKSEVAVSIVNKIEFSALNKMEKSIDGRMIKDICAKLKVDRLGNISI

SEQ ID NO: 24130 - protein, 1014 aa, unidentified
  REGION 1..1014: note = Cas Enzyme sequence
YLFNLLKENPYARLKGKTFYRKKYIEEFDTIWMTQKQFYPDILTGEPGKKDYSSLYSILKNDILFYQRPLKSAKGLVGKCRYEPQLACTPVSSPLFQHFRIWKSLNDIRIIRESGEEERLSHQQKLKIYEALHTAKDLDKNRNLTAKSKVLKKILEFKGDKEKLNFDSIPGNKTYLSIQDALQKAGVSHPENLRFTRENEEHKPAAEKTGLNALWHLSYSIEEEETLVKALLKNNRFGMTEAQAKIYAQAIAFPQDFSSLSAKAIRTLIPHMENGYDEYEATVEVGYRHSDSETKQEIAEKKLLPSVALVKPNELRNPVVEQILNQAIHVVNAISEKHGKPDEVRIELARNLRATADQRSNMTKRIREQEALNKEFEKEIAAIKGTASITARDRERLKLWKETKMRCLYSGKTINQSDVFNGRTEIEHILPRSLFADNSLQNKILVFKEFNEQKKQRTAWDYIQQDKPRDPESYKKEVMELLKNPKTDRSGQGISKLKRDYLLMAQENIPTDFTNAQLKATEYITKEITKRLKSSIRQVTLTSGAVTAILRDDWGLNETLRDINLPRYAQAGKVVQEDRFNAHKNEKYTVTKIEDWSKRDDHRHHALDALVVALTTQGVIQRINTLNAVNGTVYSGNKKQRFPNPPVGNIHAQVKDHLNNMLLSFKKSSKAVTLKKSKAKRKDGTKFNIQTLVPRGSLHEDTIFGKIRRIARMPMPIAKAFHQVENIAEPVVKQLVRLRIEEQDGDILKAIKQLKQSPMEKKGKPIEFVKVFEEVYTKRVDITALSQPQVEKILDAGIKAKVKERIGSDINPQAIKAAFENYEQNPLYLDDKKTIVIRKISVEDNGDLTQVRSDKNGQAQGYAYLKNNHHALVHETPDGNWTFRTVSLWEATARAQEKLPVIDKSSTPDLKFVMSMQNNDLFFRTPEGEEIPEKDWFFQPENQNKINQNLFRVQKMSMAGNACYVVFRHQFETNLKDENTIRGLAWERIQSNDKLKTWRKIHLDKTGHIIRVGE

SEQ ID NO: 24131 - protein, 1222 aa, unidentified
  REGION 1..1222: note = Cas Enzyme sequence
MKKILGLDLGVASIGWAYIHEADKENEKSEIVDLGVRIIPIDSDNKTKFEKGQASTVNQDRTSKRGARRNLDRYQLRRKSLVNVLKQLNMLPDENLIKLKVIELYALRDKALKQELSLTEIGRILLHLNQKRGYKSSRKEDAKTENTDKKSKESEYLGGINSRSAELKEKGITVGQKLYFDFLENFNYNQQQIVSLSIKNKIYPREDYITEFNAVWEFQSKFHPNVLTENNKIKIRDGIIYMQRPLKSQKGLISICEFEGRKVRVNKEGKEQEKFIGPRVAARSNPLAQLSKIWESINTLTLDSKDSQTKRIPSIEEKQKLFELLNNSEKIGIKDIRKILGDNSLRSNQQVEKAGLRGNETRVRIIAALEKNNIDKQVIDKLTQLDISTINKAINQNIHESVNGYQSKSKNKKFELDAYSVIDKQSGEIIELKEITTDIDKQPLYIVWHLLHSIDDKTELKNAILKHKSLAHIGITEEIALALTTVVFKNDDYANKSTKAIRKILPFLMNGYVYSEACALAGYNHSLTKVDNLKRVLLEQLPQLKRGELRQPVVEKILNQLINIVNAILKEPSMGKPDEIRIELARELQQSADERSDSYSYNNKRSAENDEIAKEIEKYKLKPTGHRIKKWRVWHETKGFSLYTGKTIGLSEFLNADGVDIEHIVPQSLLFDNSLSNWTICERAENINKGALTAYDWMKGKGDAALKEYINHVNYYYEQFISKDNKEKAIYRVGISKRKRDYLLMPFEKIPSDFINRQLNETRYITRKATEILHQVCHQVKVTSGGVTDYLRHHWGYDNILHDLNFERYKQAELTYINEDKKERIKDWSKRMDHRHHAIDALVVACTKQSIIHRLNNLNQKKEKFENIKDVENKGLKKLVQDYKLFDTNTLSNKIANTLISFKAGKRVVSRRKNKYSNGKLQQRLEPRGSLHEESVYGLIKRIAEKPLKINSKIKLEDIENVVSTKHKALLKERLAQFDNNPALAFDKLNKNPIWINEEHKKALTEVKVYEYTTAIKYKLNESFKEKDAEYIIDKAIREIVKQRFKEKGNNALKDLTNEPLLFNDKPINTVRCYAEVSAYEILKYDKEKNKAISVVKPGNNHHVTICSDENGKQYELETVTFWEAVARAKQGIPIYSKPINDNHILVTTLQENEIIEKVSNENNKQYFRLRKMSNQEYYFLNIYTTSVDYSMTAKKLSNCLYSTPNNFSYKKIKINILGKIV

SEQ ID NO: 24132 - protein, 1334 aa, unidentified
  REGION 1..1334: note = Cas Enzyme sequence
MKKILGLDLGSSSVGWAFVQENEENTTILGAGVRIVSLTSDETNDFQKGKAISINKDRTLRRGARRGIQRFKQRREAILRKFKSIEFISKDFKYAEEGSFSTHQSYAIRAKAATEQISQEQFVQVLLMLNKKRGYKSSRKAQEAITDGQEMGVELDGMEIAQKLYHQNLTPGQYALPIVLQGGEVPEFYASDLTNKLKRIVHFQLSVNSKLPQDLLECVLNKSRNATYYYFDKISGIQIAENKGTREEIKKQKFIWRNTALIEKIDAGILAYILGDLNDQISKASGYLGKISDNSKELTINNLTVGQYKFKALTENPHASQRNWVFKRSDYLNEFERIWETQNKFYPELTEELKKEIRDVTIFYQRKLKSQKHLISFCEFEAKHRVAPKSSPIFQLFRMHQNINNIEIKSDLPIVIDEEVRNAILEILTYNGTLKDKDFLIGLGINHKEYKINFEKINGDLTRSNILKILIQAWEKMGNSTKDLEYPLKKSDALKVLVGLGLPSSLLDLDIELGGNDFDKQPYYQLWHVLYSLDDDAKVMNALNKNFGFTEELAKAMLSVKLEANYGSLSAKAMRKIIPHLADGLIYSDACAIPYKTHSKLSLSNEQNDARQLKEKLDLIKKNSIRNPVVEKVLNQTINVVNAIIASEKYGKPDEIRIELARELRASNEEREMMTKSLSENTKLNEEVRNILQKDFNLARVTRNDIIRYKLWQETSGISIYSGRPIPASDLFSGKYDVDHIIPQSRLFDDSFSNKVLCERELNNEKDNQTAYSFLKQKFSAADFEQFVLRVKELSKLKKIKHTKAEKLLLTNENIPDNFIQRQLNETQYISKKAKEILHDICRNVYTTTGSITDKLREDWGLVEIMKELNFSKYQIAGLTYEEQGKNGERLLKIKDWSKRNDHRHHALDAITIALTKPAYIQYLNNLNANNKGIIQNNLQNKYVERIDGKWRFKSPISNIRGEIKSLLESILISHKAKNKVVTKKINKIKTKSGIKLQSTLTPRGPLHKETIYGEQMVYETSLVSVGANLTEEAIFSVANKKEREALLSRLHAFEKDPKKAFTGKNSPAKNPILSNPSKNKEIGNKVKVVSLTPTYTVKKLIGPDLDEKKIQKIVDIGVQRKLMERLAAFGGDPKKAFVNLDENPIYLDQQKKITIKSVKLSGITTAIAIHTKKNNPINSSPKDWVSLGNNHHVAIYEDDNGNYQDELVSFFTAVTRASAIPSMPIIQREHPNGWNFLFTMKANELFVFPSDEFNPAEVDLNNPKNYHLISRHLYRVQKLSSKDYFFRHHLETNVDTSKELFGLTWKRIRNNDNLKGIIKVRLNHLGEIVKISE

SEQ ID NO: 24133 - protein, 1428 aa, unidentified
  REGION 1..1428: note = Cas Enzyme sequence
MTKNILGLDLGTTSIGFAHIIEGDSTEQSSIKKIGVRVNPLTTDEQTNFEKGKPVSVNADRTLKRGARRNLDRYQDRRKNLIDALLKANIITTETILAENGKNTTHSTYFFRAKSAVEKIEKEELARVFLAINKKRGYKSSRKAKNEDEGQIIDGMTVAKRLYEENLTPGQLAYQLLKDGKKYLPDFYRSDLQSEFDKVWDFQKQFYPEILTDEFYKELKGKGQRATSAMFWAKYGFNTAENKAKSREDKKLQAYLWRSDAVDKELEKEEVAFVITEINNNLNNSSGYLGAISDRSKELYFNNQTVGQYLYEQFKKNPHTRLKNQVFYRQDYLDEFEKIWETQAKFHPELTEQLKSEIRDIVIFYQRKLKSQKGLVSFCEFESQEKIINGHKKTIGLKVAPKSSPLFQEFKIWQVLNNVLVRKKGSKKRVVKETAPTLFDEEKEIFVFDLETKQKLFDELNIKGNLKSAKIIELLGHKSADWEMNYSELEGNRTNKILYDAYLKILELEGYDEDLLKLQGKDDIDVSELKAPVLEIKNMVKRIFEVLNINTEILEFDAELDGKDFEKQASYQLWHLLYSYQEDDSKTGNDTLFRLLEEKFGFKKEHSQILANVAFSDDYGNLSSKAMRKIYPHIKELSYDKACLQAGYRHSASSLTKEEIANRPLKNQLELLKKNSLRNPVVEKILNQLVNVINTIIETNSKKDEEGNITEYFKFDEIRVELSRDLKKNAEERREMTTNINASKIAHEKIFKLLQNEFHIKNPTRNDIIRYRLYEELKNNGYKDLYSNTYIPREILFSKQIDIDHLIPQSKMFDDSFSNKSVVFRKDNIEKGNRTAFDYILEKYGEIGVEDFKLRIEMLFEQGKKNKEEGISKAKYQKLLKQESEIGDGFIDRDLRDSQYIAKKARNLLYEICRVVTPTTGSVTARLREDWDLINIMQELNFEKFKTLGLTEKVEKKDGSFKERIVDWSKRNDHRHHAMDALTVAFTKHSHIQFLNFLNARKNENHKEHNAIIGIEGKETTWKYDDDGNKKRVFNLPIPNFREQAKEHLENVLVSHKAKNKVVTKNKNKTKSKNGEKTKVELTPRGQLHKETVYGKYQYYINKEEKVSAKFDEETIKKVANPIYKKLLLERLSENGNDPKIAFTGKNILSKNPIYLNEKKTETLPETVKLTWLEEDYSIRKDITPDNFKDVKTIEKILDEGVKRILLNRLKEFGNDPKKAFSDLDKNPIWLNEAKGISIKRVTISGVKNAEFLHYKKDHFGNEILDKNGKQIPVDFVSTGNNHHVAIYRDEKGNLQERVVSLFDAVQLVNLGEPVIDKNYNQGSGWQFLFTMKQNEYFIFPNEKTGFNPKEIDLLDPKNKKEISPNLFRVQKLATKNYFFRHHLETTVDEVVQLKDVAYVSIRSTSPLGNIIKVRLNHLGDIVKVGEY

SEQ ID NO: 24134 - protein, 1297 aa, unidentified
  REGION 1..1297: note = Cas Enzyme sequence
MAKNILGLDLGTNSIGWALINQDFENKQGNILGMGSRIIPMSQDILGDFGKGNSVSQTAARTGYRGVRRLRERFLLRRERLHRVLNIINFLPEHYASQIDFEKRFGKFNEETEPKLAYNKDGFVFKNSFDEMLTDFKNNQPQLLENDKKIPYDWTISYLRKKALSQKIEKEELAWILLNFNQKRGYYQLRGEEEEENPNKLVEFYSLKIVDVLADEPQKGKSDIWYSLVLENGWVYRRASKTPLFDWKDKTRDFIVTTDLNDDGSVKTDKDGNEKRSFRAPAETDWTLVKKKTEQEIDKSHKTVGVYIYEALLQNPKQKIKGKLVRTIERKFYKDELKQILEKQKEFHQELKNDDLYNDCVRELYRNNEAHQLTLSKKEFVHLLMEDIIFYQRPLRSQKSSISNCSLESRKYKDENGVEHIQFLKAIPKSNPYYQEFRIWQWIFNLNIYKKDDDANVTKEFLNTTENFENLFEFLNNRKEVDQKALLKHFKLNEKTYRWNFVEDKKYPCNETKTMISSRLDKIENISDDFFTRETEQKIWHIIYSVNDKMEYEKALKSFARKNNLDENSFFEAFKKFPPFKSEYGSFSEKAIKKLLPLMRLGRYWNYENINDDSKERIQKIITGEYDENIKDKVREKAIHLTSENDFQGLQLWLAQYVVYGRHSEASIIGKWNSTDDLEEFLKEFKQHSLRNPIVEQVITETLRVVKDIWLQYGNGAKDFFNEIHIELGREMKQTKDERLNATKRITENENTNLRIKALLAEMMTDNSVENVRPYSPMQQEILKIYEDGILKSDIEIDDDILKISKTAQPSSSDLKRYKLWLEQRYKSPYTGQIIPLNKLFTPEYEIEHIIPQSRYFDDSFSNKIICESAVNKLKDNYIGLGFIKQFGGTIIELGFGKSVKVFEIDEYEDFVKKHYANNRGKRNKLLLEEIPEKMIERQLNDTCHISKYISGVLSNIVRVEDGSDEGVNSKNIVPGNGKITTQLKQDWGLNDVWNDLILPRFERMNQLTNSTDFTAWNENHQKYLPTVPIEFSKGFSKKRIDHRHHALDALVIACATKDHVNLLNNQSAKSDTKRYDLKKKLMKFEKAVYKHPQTGERIERDVPKQFLKPWESFTIDAKNNLDKIIVSFKQNLRVINKATNYYEKYVEKDGVKTKEKIQQTGTNWAIRKPMHKETVSGKIDLPWVKVPKGKILTATRKSLDTSFDLKSINSITDTGIQKILRNYLEFKESSELAFSSEGIEDMNKNIEKYNDGKLHQPINKVRVFELGSKFQVVQTGNKKDKYVEAAKGTNLFFCSL

SEQ ID NO: 24135 - protein, 1404 aa, unidentified
  REGION 1..1404: note = Cas Enzyme sequence
MKKTLGIDLGTNSIGWAIRNTDLLDNQIEDFGVITFEKGVASEKGNEFPKVQKRTESRGKRRNYQSEKYRKFALLNFLIQKNMCPLTMDEFCIWKDYRKGKKREYPQSEAFLNWVRFDFDGDGLPDFHLFEKGKDESYYVFRAFAADENHTNVFENNPHILGRVLYQMVQRRGFKGRDEEEAKTMLVGSDKNGTKGRNDIEGYIEKYKTLGAALYYHQKDFGGRIRQRYNLRKDNENELKEVCKLHKFSQEDYEKLWKAIIWQRPLRTQKGLIGNCIYEKNKKRVAVSHPLYEEYRTWVFINNLNIIPPFGEAKQNYIKEKIYPLFYKSKPDFELSDIDKQLKKDGAKRASKHNEKTKVLSVKLLKQFQDVFGEDWKEKLQWNINGDRNPQPEKREESLYTFEDLWHILLTFDGQENLKKFALEKLNLDEDKATKFSKIKLQQGYATLSISAIKKILPYLQRGFLYSHAVYMANLYKMLGETAISETLTNHFSEEILGILDNDSFNRKNSAIINNLISEMLNDEHRYYVEDDRSLDKTEEKKVLKSIIDNYGLESWENFNEEKRIEIIDFVSGKYLEFLKKTYFDKTNLFIQPERIHDKIFNFLKETYHVSEDKRKHLWHPSEQENYAKADDYFEYSIGNKKYYVKEESKQNFLSRNPDAEFDGRQLKLLGNPEPLSKGFKNPMALKSLHKLKNLVNYLLQTRKIDEETRVVVEIARELNDKNKRKAIENWQKDREKENEAFRKEIEIYKEQFPHINLIDENTLIRKIRLWHEQNKICLYTGKTIPFSELIIGNKYDFEHTIPASISFDNELKNLTISDSGYNRLHKGKKFPTQLSNYDSEQTINGENCNSIIRNIEFIFGERTVEYKEIKGKTEKIVKWKKIDELEKQFDEWKKKASYASTKEIKDNCIVKYHTIKMDLDYLKAKLATFTITEYKAGWRNNQIRDTQIITKYALPYFKTLFKRVSVEKGGVTDIFKKVYKVQSRNTKKDRSVHSHHAQDAAILTLIPNAFHRERIIKAYENEIDNRTGKTYHELPLDWNNFSENFILELKDKVLINNLTDNRTITQTYKTVRKRGKVQYDIDKEGNSLKRVSKGDTIRGQLHGETFYGAIKQPVRDEDNKILFDDNKKMMLKDEIYLAVRKPLVYKKDANSPGFKTLDEVEKVIVDKDLFKMIKKQVEESDFKTALTDGVYMLDENGKKVNRIRRIRCFENGLKYTTAIKVHQHSFASDKDYKKSTLATNGENTYCLFYKNDMGKAMRILSIVDLAEIKLKNIQNLYNEPEFSSFESGKGKNKYEIPLYSVLKSGDKVLFYKENIHELKDLEQKELSDRMFKMYQFEKDGRIKFRHHLAAGIDTELKKDNQEYSSVNFDDKPVFLRLRQGQWNFAIEGKDFETSLDGKINWKI

SEQ ID NO: 24136 - protein, 1220 aa, unidentified
  REGION 1..1220: note = Cas Enzyme sequence
MKKILGLDLGVASIGWAFINEAENENEKSEIVDLGVRIIPIDIDSKSKFEKGQAITINQDRTLKRGARRNLDRYQLRRKSLSAVLKALNMLPDENLIKLKTIDLYSLRDKALSQKIELKEIGRVLLHLNQKRGYKSSRKEDAKNETENKGKESAYLGGISTRSTFLKENNLTIGQKIYIDFLDNYKQNDNKIVSLSIKNEVYPREDYINEFNLIWAKQMQFYPEILTESNRQKIRDEIIYHQRPLKSQKGLVSICEFEGKKVIVIKDNKQVEKFIGPKVAARSNPISQVCKIWESVNTIQLESKDGFKKVIPNIEQKNILFEYLNNNEKLGINELRSLLKLDKTYRTNQQVEKVGLKGNDTRIRIINALIQANLEEKIINSLTKFDPKFEAVDFNEILKKSINAYQPKLKSKKFSADKVVVDMHTGEEIELLQISAEIEKEPLYIIWHLLHSIDDKKELLNALLNNNTLKKLGLTEIAAYELTKVVFKSDDYGNKSCKAIRKIIPYLMNGYVYSDACALAGHNHSDTLTKEDNLKRDLLNQLPLLKKGELRQPVVEKILNQLINLVNAILKDPTMGKPDEIRIELARELQQSADERNDAYSYNNKRSAENDESASEIEKYGLKPTAHRIKKWRVWHETKGYSLYTGKTIGLSEFLNAQAVDIEHIIPQSQLFDNSLSNWTICEREENIKKGAQTAYDWMKNKGEAALEEYVKQVNYFYQQFIEKNPKEKGIYRVGFSKRKRDYLLMPFEKIPADFISRQLNETRYITRKSSEILKQVCHNVKITSGSVTDYLRHHWGYDNILHDLNFERYKNAGLTYINEDKKERIKDWSKRMDHRHHAIDALVVACTKQSIIQRLNNLNQKKEKFQNLKEVDNKGLKKLVEDFKLIDTKTLSNKIENTLVSFKAGKRVVSRRKNKVGNQLRLEPRGPLHEESVYGLIKRVVDKPVKLNAKFKIEDVENIVSGKHKKLVKERLAAFDNNPAIAFNKLNKNPIWISEEHKNALTEVKVYEYTTAIKYKLNESFKEKDAEYIIDKAIKNLVKERFKEKGANALKDLENNPILFNGKPVKSVRCYAEVTAYEVLKFDKEKNKPKSVVKPGNNHHVTICADENGKQYEFKVVTFWEAVANSKLGLPVFSKPNGPNHKMICTLQENEIVKVPDKALINSYYRVQKITSGNYWFMNIFNTVRDESLTGKKVGTAIQFSAGSFNAKKIKVNILGKIV

SEQ ID NO: 24137 - protein, 923 aa, unidentified
  REGION 1..923: note = Cas Enzyme sequence
VTVFKKFPAFKKEYGAYSSKAIKKLLSVMRMGSHWSEQAIPADLRSRINKIIDGEADESIDIKTRERVASLTSVSDFSGLPVWLACYVVYGRHSEAKEIQQWKTPDDMNDFIRSFRQGSLRNPIVEQVITESLRTVRDIWRQVGAIDEIHVELGREMKNPADKRKKMTQQILDNENTNLRIKALLVEFMNPEFDIDDVRPYSPSQQDILRIYEEAALNGTEDVPDDIKEIIAKFNQTDIKKRPTHTEVMRYKLWLEQKYCSPYTGAPISLSKLFTSAYEIEHVIPQSRYFDDSLSNKVICESEVNKLKSNDLGYEFIKKHHGEIVTLSGGRTVKIFNEAEYEKFVSDNYSRNRAKKEKLLLEDIPEKFIERQMNDSRYISKVVKGLLSNIVREDNEPEATSKNLIVCTGGVTDRLKKDWGINDVWNSIIMPRFERLNDMEGSTRFTAVNGNGKLVPAMPLELQKGFNKKRIDHRHHAMDAIVIACAGRNIVNYLNNASASKNATTSRHDLQAILCTKTKIDDNGNYRWLLNKPWDSFTQDVKFALNHIVVSFKQNLRVINKTTNVYQHFDENGHKVMSKQTKGDAWAIRKPMHKETVFGEVNLRRTKTVQLSVAIKKPERIVDKILRERIMKLLRSKFNATRIKAYFEERKGEWGETNLAKIEVYYFTKETNERFFAVRKSIDTSFDEKKINESITDTGIQKIMLNHLKANGGKADIAFSPDGIEEMNRNIVSLNNGVAHKPIYKVRVYEQANKFAVGETGNKRSKFVESAKGTKLFFAIYKEEIVDSKTGCLTTKRSYATIPFNIVIERLKQGLRPAPDNEEGMTPQYILSPNDLVYLPTTEEIENRHISTPIDTSRIYKMVSSDVGTCFFIKHEVAIPIVNKVEFTTSNKMERAITGEMIKETCVPISIDRLGNIKIKEEL

SEQ ID NO: 24138 - protein, 1191 aa, unidentified
  REGION 1..1191: note = Cas Enzyme sequence
MKTQQDLDTQEKTVGEYIYDTLLTQPRQKIRGKLVRTIDRPYYKKELYRILETQRNFHPELQDATLYKACIEELYATNDDYRNSIAKRDMVYLLVDDVLFYQRPLKSKKSLISNCPYEYHLYTKDGEEQKEYLKCIAKSHPLFQEFRLWQFLSSLRIYKKEATADIDVTDRFLANDAARAELFAWLNDRKSIDQKSLLKYPGFGLKKDPDRYRWNYVEDKSYPCNETRAMFLKAIDKAGLDATLLTTDIEEALWHILYSIADPKELAKALKRFAEKHGLQEEFVDAFKNLPPFKAEYGAYSAKAIKKLLSVMRLGKYWSPENIPASVRAQIDAITSGECSEKLKVQMEGASLLNGNIEQFSGLPVWLACYVVYGRHSEGKEIQQWESPEDIDNFLNHFKQHSMRNPIVEQVVMETLRVVRDIWKQYGKIDEIHIELGRNLKEPADKRKKMTNRILENERTNMRIRLLLMEFAHPEYEIEGVRPYSPSQQELLRIYEDEVLQSEEVDDEILEILKKFQQADSAKQPKSSEIKRYKLWLEQKYRSPYTGKPISLARLFTSDYEIEHVIPQSRYFDDTLSNKVICEAEVNKLKSNALGFEFIKQHHGEKVQLSHGGTVTIFTKAAYEEYVKEHYARNRKKCRNLLLEDIPESFSSRQLNDSRYISRVVKTLLSNLVREDGEEEAISKNVVPCTGSVTDRLKKDWGINDVWNQIILPRFERMNTFGIGSFTSVTANGNIIPDIPLQYRPGFNKKRIDHRHHAMDAIVIACANRNIVNYLSNVSASENGKTTRRDLQTLLCEKHKRDGSNYEWLIRKPWDTFTHDVYEALSTTIVSFKQNTRVISRCTNHYERIVNGKKVHVPQTKGELIAVRKPMHKDTVFGEVNLVRTKFVSLNDAIKTPSRIVDKYLRESIKKLLAEGCNGKKIKEYFAAHNTEWEAHTQKAKIEVRYFTQETNERFYAVRVPIDTSFTEAVIKKSVTDTGAQKILLRHLANCGGDSNVAFSPDGIENMNRNICELNDGKFHQPIYRVRKYESANKFSIGSTGNKRTKFVESAKGTNLFFAIYEQDGVRSYSSIPLRTAVERAKNHLTIAPENEQGISAKYVLSPNDLVYLPTQEDIANGEIASPLDIDRIYKFVSSSKGQAFFISNSIASPIVNKTEFGPLNKAERALSGEMIRETFIPLKVDRLGNIAIKE

SEQ ID NO: 24139 - protein, 1521 aa, unidentified
  REGION 1..1521: note = Cas Enzyme sequence
MKKILGLDLGTNSIGWAVVNSQTTDDGKEILTGIDSCGSRIIPMDAAVLGDFDKGNSKSQTAERRGYRSVRRIRERELLRRERINRALDILGFLPEHYSIALDRYGKFASREEECKLAWCKDETGQYTFLFKSSFDEMIADLAKSQPMLVADGKKVPYDWTIYYLRKKALTQKIEREELAWILLNFNQKRGYYQLRGMDEDEEDSDKKAKTRQYFDRQVITKVTDTGTLYKGLKILVVELADGSKGKVFRRDIPEWAGQEKDIIVTVDLDKDGNDRHEDDGSLSCRYNIPTDAEWDTKWALVKAKTQQDLDNQHKTVGAYIYDTLLQRPDQKITGKLVRVIERHYYKDELIQILESQLRFHDELRDKEMYAKCIEALYASNEAYRNSIATRDFVYLFVDDIIFYQRPLKSKKSLIDNCPYEENKYTDKDGVEHTVPLKCIAKSHPLFQEFRLWQFLSNLKIYQKERRNAATNRIETDVDVTQQLLPDRESYVALFEWLNDKKEITMDGLLKYPPFGLKKDVANYRWNYVDDSSKKYPCNETGAQIAAFLSKAGIAPSFIKEDGNEESLWHILYSIEDKQELTKALTSFAGKHNLGEDFVTVFKKFPAFKKEYGAYSSKAIKKLLSVMRMGSHWSEQAISADLLSRINKIIDGEADESIDIKTRERVASLTSVSDFSGLPVWLACYVVYGRHSEAKETQQWKTPDDMNEFIKSFRQGSLRNPIVEQVVTESLRTVRDIWRQVGAIDEIHVELGREMKNPADKRRKMTQQILDNENTNLRIKALLLEFMNPEFDIDDVRPYSPSQQDILRIYEDGALNGTEEVPDDIKEIIAKFNQADIKKRPTHAEVMRYKLWLEQKYCSPYTGATISLSKLFTSAYEIEHVIPQSRYFDDSLSNKVICESEVNKLKSNDLGYEFIKKHHGEIVTLSGGRTVKIFNEAEYEKFVSDNYSRNRAKKEKLLLEDIPEKFIERQMNDSRYISKVVKGLLSNIVREDNEPEATSKNLIVCTGGVTDRLKKDWGINDVWNSIIMPRFERLNDMEGSTRFTAVNGNGKLVPAMPLELQKGFNKKRIDHRHHAMDAIVIACAGRNIVNYLNNASASKNATTSRHDLQAILCTKTKTDDNGNYRWIMNKPWDSFTQDVKFALSNIVVSFKQNLRVINKTTNVYQHFDENGHKVMSKQTKGDAWAIRKPMHKETVFGEVNLRRTKTVSLNEAIKNPTRIVDKTLRERIEKLLKSKFSAARIKAYFEERKGEWGEQNLSKINVYYFTKETKDRFFAVRKSIDTTFDEKKINESITDTGIQKIMLNHLKANGGKADIAFSPDGIEEMNRNIVSLNDGVAHKPIYKVRVYEQANKFAVGETGNKRSKFVEGAKGTNLFYAIYESKSTDSETGQIVTKRSYATISLNVVIERQKQGLPSAPENEDGIAPRFVLSPNDLVYLPTAEEIECGHISLPINTDRIYKMVSSGKAQCFFVKYEAASSIVDKFEFSSMNKMERAITGEMIKETCVPISIDRLGNIKIKEEL

SEQ ID NO: 24140 - protein, 1386 aa, unidentified
  REGION 1..1386: note = Cas Enzyme sequence
MKTIFGLDLGTTSIGWAAVQESENHDEQSVILDMGVRLVPLSQEDTDSFTKKDKETAQGKRTLKRSTRRNLQRYKLRRDNLISVLKSAGIINDKTILAENGSYTTFQTLELRAKAVNEQISLEEFARVLLAINKKRGYKSSRKYKTEDEGAAIDSIDIAKRLYNEQLTPGQLSLQLLNENKKKLPDYYRSDLQEEFDRIWETQAKYHPTLLTTELKAELKDKTPRVTWAILENKWVWTKQGQSHKYTLKDLAKRQGTKQEIRRETISWRVAALDKAVEPDQLAYIFQDINAEISRSSGYLGRISDRSKQLSFGNITVGQFLINQLKANRHTSLKNQVFYRQDYMDEFDRVWETQAKFYPQLTAELKHEIRDIVIFYQRRLKSQKHLINYCQLIESEIADKTTGEIRKVGPRVAPRSSPMFQQFKIWQSINDIVVTLPDDQQRPLTLDEKTSLANELSIKEKLTNKEIIAILFGSKAKGYALNVDKSIQGDTTGHNIYLGFSDILEDVGYDAIDFSIAADEIKQMVRQIFQSLGICTDILTFNPLAERPEREPYYQFWQLLYSFEDDAQTGVTKLIQKLEDRYGFDGQQARILTRVTFVDDYGNISIKAIKQILPYMMEGLGYSDACAKAGLNHSKSSITKADNEARQLLQQLPQIAKNSLRNPTVEKILNQMVNVINALIARYGHPDEIRVELARELKKNKDERIKMTESLNQAEAENNNIRKILMSKGLKTVGRNDIIRWKLYQELATNGYKTLYSDKKIDEADVIDGKNIDIEHIIPQSLLFDDSISNKTLEYRDVNINKGNMTAIDFVKSAYGEAGLTRYINTVDELFKDKPGKQGKYKKLMMHRDEIPTGFIDRDLRQTQYISRKALEILHDVCRQVIATTGSITDRLREDWQLIDVMKEISIDKYRALGMVEEIVKGDKRIVKIKDWTKRNDHRHHALDALTVAFTNRSIIQYLNTMNATDCDSDEGRAAAAFKNKYVVKGRISAPMPLNILRAEAKKHIENILISVKAKNKVATKNHRAGDTLTPRGPLHNETFYGKRTVRGYEPRKIDASFDSEVINTVADKQERKALARRLAEFGGDPAKAFTKKNAPAKNPIWLDEAQSVALPDKVNVVVERTVYTIRKDISKDLNMGKVLDPVIRKKLSDRLAEFDGDATKAFSNLDENPIWFDRKSGIAIKRVTIDAGIASPVAIHDKCNHLGERILSDDNIPVPSDYVATGSNHHVALFAAPALDKNGKIKLDSDGNPLETVEEHIVSFFEAVERIDQGLDIIDYNYNSHLGWKFLMTIKANEYFIFPDIENGFNPREIDLTDPKNRELISPHLYRTQAISSKYYCFRHHLDTSAEYPRELQNYTWIRITMISRMKDVIKVRLNQLGQIIHVGE

SEQ ID NO: 24141 - protein, 1521 aa, unidentified
  REGION 1..1521: note = Cas Enzyme sequence
MKKILGLDLGTNSIGWAVVNSQTTDDGKEVLTGIDSCGSRIIPMDAAVLGDFDKGNSKSQIAERRGYRSVRRIRERELLRRERINRVLDILGFLPEHYSRALDRFGKFASREEECKLAWRKDETGQHTFLFKSSFDEMIADFAKSQPALVADSKKVPYDWTIYYLRKKALTQKIEREELAWILLNFNQKRGYYQLRGMDEDEEDGDKKAKTRQYFDRQVITKVTDTGTLYKGLKILVVELADGSKGKVFRRDIPEWAGQEKDIIVTVDLDKDGNDRHEDDGSLSCRYNIPTDAEWDTKWALVKAKTQQDLDNQRKTVGAYIYDTLLQRPDQKITGKLVRVIERHYYKDELIQILESQLRFHDELRDKEMYAKCIEALYASNEAYRNSIAARDFVYLLVDDIIFYQRPLKSKKSLIDNCPYEENKYTDKDSVEHTVPLKCIAKSHPLFQEFRLWQFLSNLKIYQKERRNAVTNRIETDVDVTQRLLPDEESYVALFEWLNDKKEITMDGLLKYPPFGLKKDVANYRWNYVDDSNKKYPCNETGAQIAAFLSKAGIAPSFIKEDGNEESLWHILYSIEDKQELTKALTSFAGKHNLGEDFVTVFKKFPAFKKEYGAYSSKAIKKLLSVMRMGSHWSEQAIPADLRRRINKIIDGEADESIDIKTRERVASLTSVSDFSGLPVWLACYVVYGRHSEAKEIQQWKTPDDMNDFIRSFRQGSLRNPIVEQVITESLRTVRDIWRQVGAIDEIHVELGREMKNPADKRKKMTQQILDNENTNLRIKALLVEFMNPEFDIDDVRPYSPSQQDILRIYEEAALNGTEDVPDDIKEIIAKFNQTDIKKRPTHTEVMRYKLWLEQKYCSPYTGAPISLSKLFTSAYEIEHVIPQSRYFDDSLSNKVICESEVNKLKSNDLGYEFIKKHHGEIVTLSGGRTVKIFNEAEYEKFVSDNYSRNRAKKEKLLLEDIPEKFIERQMNDSRYISKVVKGLLSNIVREDNEPEATSKNLIVCTGGVTDRLKKDWGINDVWNSIIMPRFERLNDMEGSTRFTAVNGNGKLVPAMPLELQKGFNKKRIDHRHHAMDAIVIACAGRNIVNYLNNASASKNATTSRHDLQAILCTKTKIDDNGNYRWLLNKPWDSFTQDVKFALNHIVVSFKQNLRVINKTTNVYQHFDENGHKVMSKQTKGDAWAIRKPMHKETVFGEVNLRRTKTVQLSVAIKKPERIVDKILRERIMKLLRSKFNATRIKAYFEERKGEWGETNLAKIEVYYFTKETNERFFAVRKSIDTSFDEKKINESITDTGIQKIMLNHLKANGGKADIAFSPDGIEEMNRNIVSLNNGVAHKPIYKVRVYEQANKFAVGETGNKRSKFVESAKGTKLFFAIYKEEIVDSKTGCLTTKRSYATIPFNIVIERLKQGLRPAPDNEEGMTPQYILSPNDLVYLPTTEEIENRHISTPIDTSRIYKMVSSDVGTCFFIKHEVAIPIVNKVEFTTSNKMERAITGEMIKETCVPISIDRLGNIKIKEEL

SEQ ID NO: 24142 - protein, 926 aa, unidentified
  REGION 1..926: note = Cas Enzyme sequence
MKILGLDLGTNSIGWALIEQDFEERKGKIHGLGSRIIPMSQDILGEFDKGNSVSQTAERTGYRSVRRLRERHLLRRERLHRVLNILGFLPEHYASQIDFAKRLGKFINETEPKLAYRPIWNEAKQKNEYDFIFKKSFEEMLDDFRQHQPEILVNEKGESKLIPYDWTIYYLRKKALTQKIEKEELAWVILNFNQKRGYYQLRGEEQEENPNKLVEFHSLKIVEVTADEKPNNKGETWYSLKLENGWVYRRPSKTPLFDWQNKVRDFIVTTDLNDDGSVKTDKEGNEKRSFRAPGEDDWTLLKQKTEQEIDKSHKTVGAYIYDTLLKNPKQKIKGKLVRTIERKFYKDELKQILLKQKDEHPELQNNDLYNDCLQELYRNNEAHQLLLSSKEFVHLFLDDIIFYQRPLRSQKSSIGNCTLEYRKYKDENGIEHLEYLKAIPKSNPYYQEFRIWQWMYNLSIYKKEDDSNVTTDFLNSKEDWERLFDFLNNRKEVEQKSLIKFLLEQKGLKGKLLNAEIEKYRWNYVEDKKYPCNETKTLISTRLEKVENNRDNFLTREIEQKLWHIIYSVTDKIDYEKALNSFAEKNHLEVASFVEAFKKFPPFKSEYGSFSEKAIKKLLPLMRLGKYWSWDAIDERIRIRIEKIITGEYDENIKDRVREKALHLTQEDHFRGLPLWLAQYVVYGRHSEAATLGKWNSADDLEQYLKDFKQHSLRNPIVEQVVTETLRVVKDIWIKYGNGAKDFFDEIHIELGREMKNPAEERERITKQISENENTNLRIKSLLVELKNDITVENVRPHSPMQQEILKVYEEGVLNSDIEIEDDILKISKTAQPSIVELRKYKLWLEQKYRSPYTGEIIPLNKLFTPEYEIEHVIPQSRYFDDSFSNKVICEAAVNKLKDNQLGYEFIKTITEKKYKSAIKQFKFLK

SEQ ID NO: 24143 - protein, 1677 aa, unidentified
  REGION 1..1677: note = Cas Enzyme sequence
MGMLPDMISFSYHQLNGNNQEIKITGQFPSPEKLQKLFIEPIRKGNKKYKGDTALSILELRAKALNKPVSLKELGKILYLLNQRRGYSGGGDEDEKEITNQEGETQKVKKIYKEIRVSRITPLQHCEEIKIGRNKKQFPAYKIKFVNIETGEAIEGVSIKELSNGTEIDVTYTKPSTESKIVRFHFEDSETYFSYEGSDIVKESFKGKVLECTAVQEYKKKKWVYEIEINDEEENEDDKIGNGILLLKHTKNIEKIKLSEPIEFEISITTKANGTKEFEFLLPNKTSWKKNLESIEKDIAENKKLKYDFGELDATNKGNYHICHYFLERIKKEDGTINTDYKIRDNVILRKRYLEEFNAIWEKQIQVNPEFKKLVEDKSLLEEIIEYIFPERDNSKPETEQTKISQKKELKQKARTEGLKYVLEKQIIYYQRKLKPQTDLIGGCQYETAVNENKKPLYRVIERSHPLFQEFRMWDQINKCYVDARNPDDFKYKYSKRFLTIKEKQDVYNKLNEKKELTYEGWCSSLNLRYEGKGKDKKNIDWPRGLHKKEKFKGNETLKAIKTLLGESLFKKAFGEEGKFIHFLNTKYIEFYSVLFESAGSNELDILDERVQKIRKFLVEHITSEEIPENTAYNDYLDRWALEIAKFKFPRKYASLSDKAINNLLPFMQPGSQLMLTEQSEHHRKLNLLTSIYNQFKHNIKAYDAEQEKRPEHEKISKALLADFCREYEVLNEPIDKGGWPYWAAAGLMYGRHTAEQKERITDYHQIQPLSIEETLRNPVVEQMVNQTLQTIKSIFKEYKLTPDETEIRVELSRELKNNAKERESMHNTMLNNAKANKFAAYEIMQLEYEDGKKKVKPENDCKQNGCSNICYQSAKLKQPTANEILKYRLWKEQGMTSPYTGNPIPLCKLFDGSQYNKEHIIPKQRFFDDSKTNLVIAETAVNKLKDNLTAIEFIRLYGGKVVAGFPIKTLKSYELDVMNHSTFSSGKKKRLLMKEIPEDFVERQKKETQYIARKVKEKLGSIVGLQNVTTTTGGITDYLREMWKLNEAFKEMNKERFELMAKIAQEPKEAWCNYKEAESRKGGERKVLVLKNWNKRLDHRHHAIDALVIACTTQAQITQLNTLNQIVQEKLKEKYEDLRNRKDITDEEISSKLAEMSTKERDEFQEMLGSLRHFDFPWEKERFLSEAKSKIEQLLVSFKKKNRLLIQNKKDKNGKRTNELMLKVRGALHQETVYGKFNDEETKKVNIKTAFELAEFILEPEIKSKVFQRIEEYNGDIEEAIESLSSKDGKLKDENNKAIKSATLYFKEKDVYRIELTKFGEKKNPEGIIDRVIDKTGLIKKDLFHHLYSYCIKIKLEHLKADNETIDEELNQKIETLLKETLTQDSFEKFLEELDPADKKRIRGWIDGKIAFSGDGIEDFNEQRLKKNLYLKPIQRLKVLYAKKAGESSLKPIYRKHREKGKGEFDYVKPGDNYCYALLQKNESRDFLPISFFDAATWVTNQFRQDIKSEYKFSKKYDDRLKYIEGIIMQKIKEEKPGFEILYLLQQDDLVYLPIDQEDASIANSNPSNDYWFDKEKKRWKRIYRVVKFSGSRCYFIPFIYASPLNYKPIISEEEKKQREKNNNEIPKEGIFEFGSYKNCSPFSLPEIKGDTTKIIKIQDTCIKIEVDRLGNITPA

SEQ ID NO: 24144 - protein, 1524 aa, unidentified
  REGION 1..1524: note = Cas Enzyme sequence
MENNYKKILGLDIGTNSIGWAVIERDFENETGKILGMGSRIIPTDSELLSKYETGQAASKNAGRRQARGARRLKQRYKLRRQRLINSLNILGWLPDTFEPGNQMQISQQTLQEMKIAFGVEEISDDWVVYYLRHKALTKPVSKEELAKILYHMNQRRGFKSNRKAGNEIPQSEEGEETEGGKKKREKKVEIVTVKSVSDTGEKQKGNTIFEISLFDGRKGTIARKLKPEWENQELELEITRIPPTQKNSERFEFRPLSNSDADKWAKQKVAREEAIRKSGCLYPGNYYFHELKKNPHYIIKDVSIDRSFYISELTAILQKQLELNSDLNDKAAIHKIAETFYPKNLGKQKELKNNDLKHLFINDIIYFQRPLKSKKSSIADCRFAKKNFIDPSTSKKIAYKAAPVSSPVFQEFRIWQTVNNIKVLQRQYRDENGKLRIEEDVTAKYINIQALEKLYELFDNKEKITQKQILKVIGLDEKEFLINLFRLNEEKELPGNETKSLIRKLFKKASYENEGELLLSDQKKFYLLWHILYSLDEEKHITKALKNKFGLTDDVASVISKAPAFKQQYGSLSHQAMSRLLPLMKSGKHWNWNNIDKDTKQRLQKIFTGEYDTGISNQIRDLFEKYQIKSEDKCQGLSVPMAAYAVYGTHSERSSVTFDSPAQLIPKEPLKLRNPIVEQVVNEALRVVQDIWKTYGRPYEIHIELARNLKKNAKEREEMTKTITENENENKRIAAILRELKIGNPNSISDIERLKLWEKQAESKAREEFKNIKFKRPSEPTKDEIEKYKLWAQQKFLSPYSGDSIPLSKLFTRAYDIDHIIPRSRFFDDSFENKVIVESHLNKEKENKTAYEYIKSGSPKASGLLSPDEYEAHINQFFFGKKKRLLLSEDVPKTFSNRHLVDSRYISRKLNELLAPVSENSNDPVIPTSGAVTGELKSAWGLGEKMKELIKWRFERLEDKTHENYVWYDDETDQEGKPTGRKILRLNGYEKRLDHRHHAMDALIVACTTRVHIKYLNDLNASQYRKQPTEEEIKQALPKLLEAGKDNYLQSRKFKKPWKGFVAETMSALEGIIISFKKNIRLFGRKANKNLRYVQQPDGVFVKKYLPVINETGQRNLSPYVRASLHKATIAGKISLREYNSASISEAFNHPELIANKKEKKHLQQILKQANGDLKKAAKLYKENPLKDSNGIELKKVMVIEMTPYFVNRVDVTSGFDEKRIEKIPDKVLQKELREHIMHVGQLNQNRSKDEQIDPFGNEGIEILNKNRKFPITKISTKEESSAKFQIRPGAYTEADKGTNLFFVIYQNTQDATDRQFESIPLRDVIEAKKEGSGFVEDRPGYRWFTISPNDLVYMPDEGENLNTIDWNNKKLIAGKIYKMVSCTGREVLFIPQTVSKVIVDKVEFESLNKTGRALDGRMIKQHCIKLQVDRLGNIQPAKNELYNEPSEPANVLSEPEAPYQTGSLKFFSGFDEMENDQLKYFASLQPKDLLQNLKQMVLAAFGFRADPPVSSLPRTIYFNDET

SEQ ID NO: 24145 - protein, 1370 aa, unidentified
  REGION 1..1370: note = Cas Enzyme sequence
MKKILGLDLGTTSIGWSFINEAENENETSSIINTGVRITQFDNFSKVDKTGKVSESKNPVSDFNSGNGLSPNAGRTLKRGARRSLQRFKQRRNALLEIFSKIKFIPTDFVYAENGTDTTFSSYRLRAKAATEAVSKDELVQVLLMLNKKRGYKSSRKAKTADEGDAVDGMKIAKEIFENNLTPGQWIYNSLSKGEKFVPDFYRSDLQKELEKIVRFQNQFHSEQMNEKLLEDIQGKARTVTSQYFSKTLNIPLAENKGTREETKLQHYKWRNEALTIELDLKVLAFIITEINNQINQSSGYLGAISDRSKELYFNQETVGQFQYKQIQENRHAKLKNQVFYRQDYLDEFEKIWETQAKFHSELNEKLKSEVRDITIFYQRKLKSQKHLVSFCEFEKGHKAIPKSSPLFQEFRIWQNLNNILIKNETTKEPFVLNEELKNVIAQELFFKESMTDAQMMAFCDLKKGNHTANFKKIEGNRTNTEIFKAFEKILILEGYDELDFSKLDAIDIKQIFKSAFKDLEINTAILDFDPTIQGNDFDKQGYYQLWHLLYSSEEDEPLKKSLMKKFGFKENHVPFLLNINLQADYGSLSAKAIKKVLPHLIDGHIYDKSCLMVGYNHSSSLTKEQNNDRVLKETLDLLKKNSLRNPVVEKILNQMINVINAIIKDPEMGKPDEIRVELARELKNNNEQRSEMTKAINKSTAEHDKIRQLLSSVEFGIKRVTRNDIIRYKLWEECGRISIYTGNPIKGSDLFSKEYDIEHIIPKSRLFDDSFSNKTICERQLNIDKSNKTAYSYLKEKISENDFAQYENRVKDLFKTGKIKSYTKYKKLLMADNEIPEDFIARQLRETQYIAKKAKEILLEVSRNVTATIGSVTDKLREDWELVDVMKELNWEKYDKLGLTHIEEGKNGERLYKIKDWTKRNDHRHHAMDAITVAFTKPAYIQYLNNLNAKTQDEKKTGAIYGIETKYLERDKNGKLRFIAPMDNFREEAKKQLENILISYKAKNKVVTKNKNTTKKSGGTNQKIQLTPRGQLHKETVYGKLQQYVTKEEKVGANFTEEYIQKVAKKEYREALLKRLEENDNNPKKAFTGKNALNKMPIYISLKDNIVVPEKVKMVWLEADYTIRKDITPDLKIDKVIDIGLKTILQERLAEFGNDPKKAFVNLDENPIWQNKEKGIAIKRVTISGVSNAQALHTKKDHLGNEILDKNGKQIPVDFVSTGNNHHVAIYRDEKGNLQEEVVSFYDAVVRRNLGFSVINKNHEEGWEFLFSMKQNEFFIFPSNSFNPHEIDLLELNNYHLISPNIFRVQKISTKNYMFNHHLETKAVDGEMLKSKKELSKITYHFIQTPANLNGIIKVRINHLGKIVQIGEY

SEQ ID NO: 24146 - protein, 1379 aa, unidentified
  REGION 1..1379: note = Cas Enzyme sequence
MKKILGLDLGTNSIGWALVNEAENENEKSEIIKLGVRVNPLTVDEQQNFEKGKTITTNADRTLKRSMRRNLQRFKLRKENLIEILKEKGFINDDTLLSEEGNKSTFETYRLREKAAREQITLDQFARVLLMINKKRGYKSSRKAKSQDEGQLIDGMEIAKRLYNENITPGQLVLELLKEGKKYIPDFYRSDLHAEFDKIFDKQLSFHPNYLSLELKENLRGKKRDAVWAICAKTFKEKGFELVGIKRQGKANEQRIENYQWRVKGLTDKLYLEQLVVLIQQINSQINNSSGYLGSISDRSKELYFKKETVGQYLMRQLDEDPHTRLKNQVFYRQDYLDEFNTIWEVQAKFHKALTDELKAEIRDVIIFYQRRLKSQKGLVSICEFENRQIEVNIDGKNKLKTVGNKVCPKSSPLFQEFKIWQILNNLQLIDKINGAKRALDQEEKEKLFKELNIKDKLSKNDALKLLYQNHKDLDFNFKDLEGNKTNASLFKAYQNIIESSGHGEFDFSKLDANNVLEITNSVFKGLGYNTAILSFNTNLEGAAFEKQPAYQLWHLLYSFEGDNTATGMGNLIQKLTTNYGFEKEYASILANVSFQPDYGSLSTKAIRKILVHLKEGNEFSVACTLAGYKHSKDSLTKEEKENKILKSKLNILPKNSLRNPVVEKILNQMINVVNTAIDSFGKPDEIRIELARELKKSAKEREELTAAISKSTTEHEKYKTILQKEFGLNHISRTDIIRYKLYLELEHTGFHTLYSNTYIEPNKLFSKEFDIEHIIPQSRLFDDSFSNKTLESRSVNIEKGNETAIDYIKSKYDENGFKDYLLRIDDLYKSGKITKTKHHKLKMSGNEIPDNFIARDLRDTQYIAKKAKSILEELVKDVVATSGMITDRLREDWQLIDLMQELNWGKYDKLGLTEIIENREGHKIKRIKDWTKRNDHRHHAMDALTIAFTKRSHIQYLNNLNARSDKSSSIYGIESKELYRDNKNKLRFKPPIPLHDFRAKAKVHLENTLVSIKAKNKVTTININTTKKRGGLNKKKQLTPRGQLHLETVYGSMKQYVTKEEKIGANFNQEIILTVANKKIREALLKRLIAFDNDPKKAFTGKNSLDKNPIFLDSNQTYQVPLKVKTVSLETYYTIRKDVTPELNVSKVIDPKIKIILEKRLESFNGDSKKAFSNLDENPIWLNMAKKIAIRRVTISGINNAQALHSKKDKEGNFIVDPNGVSIPVDFVNTGNNHHVAVYKDENGDLQENVISFFEATSRVSLGLPIIDKTYKSKEGWVFLFSMKQNEYFVFPNEQTGFKPDEIDLLKPENYHLISPNLFRVQKFTTKDYFFRHHLETNVENDNKLKGITWLRTGLNNINNIKKIRLNHIGQIVSIGEY

SEQ ID NO: 24147 - protein, 1370 aa, unidentified
  REGION 1..1370: note = Cas Enzyme sequence
MASKTILGLDLGTTSIGWALVREGENADIIKTGVRVIPLSTDEIQNFDKGKSITTNADRTLKRSMRRNLQRYKLRRENLIEILIEKNLINETSILAEVGNASTFETYKLRSQAVDQRVELDQFARILLMLNKKRGYKSSRKAKGEDEGSAIDGMDIAKELYERNLTPGQLINERLQLGKKSIPDFYRSDLQSEFDIIWNHQKQYYPDKLTEELYQELLGKSKTITASILRKQGFDGLELKGNLSEKKVARYSLRAKAVNSKCSLEEISEILPEINNNINQSSGYLGAISDRSKWLFFNQLTVGQFLYQQIESNPHAILKNQVFYRQDYLDEFNRIWEKQREFYPEILTQELKQEIRDVIIFYQRKLKSQKSLLSICELEGKIIEIDDNGIKKKRKVGSKVCPKSSPIFQEFKIWSQLNNITYSNEGSRKSLGISLELEQMQLLYQELNWKEKLSANEVLRLLNLKGYQLNFNEIEGNRTNASFINALNDFFVKEGHDELVLSKMNSAELLDTLKKLFPIYGIDVSLLNFDSNLGGQHIENQAFYNFWHLLYSFEGDNSKSGIDKLKTALEAKFGFPFESNTPIANIKLSDDYGNLSVRAMRKILPFLKEGNRYDLACTLAGYNHSHSETKEDLSNKVLLDRLEILPKNELRNPVVEKILNQMINVINTIFETYGKPDEIRIEMARELKKSAKERENATKAIRQITDEHIKLKRELQAEFGLPNVSRNDLIRYKLYLELKDNGFKTLYSNQPIDRSKLFSSEYDIEHIIPQSKLFDDSFSNKTIELRSYNLKKGNDTAFDFISKEFGEEGLKEYEARVKALFGNQLGKKSKYRKLLMSETDIPKDFIERELRDTQYIAKKAKDILSTVVRHVSTTTGSITEKLREDWQLVDILKELNWNKYDKLGLTETKENRHGQKVNRIVDWTKRNDHRHHAMDAITVAFTKREYVKYFNNLNAKSEKDGEIYKILKTETYFDKEQKRRFNPPMPLSQFRARAKEHLENTLISFKAKNKVSTKNKNAIKTTKGKITTVQDTPRGQLHLETVYGSSQYYSSKVEKIGANFDLEKINKVANSKYRKLLQKRLEENGNDPKKAFTGANSLSKRPIFLNALETYTLPESVKLVEFDTRYTIRKPITPDIKIDKVIDKGIQLILQERLNQHHGDAKKAFSNLEENPIYLNKEKGLILKRVTIQGVNNAVALHNKKDHFGKEVRDAKGNPIPVDFVNTGNNHHVAIYKDEKGNLQEEVVSLFEAIARKNQGVEIIKKQHELGWEFLFTMKQNEYFVFPNEATGFDPAEIDLLDPSNFSEISPNLFRVQKIGKGDYWFRHHLETELIDRIELNGSAYKRIRNPKSMNISIKISINHIGRIVNVGEY

SEQ ID NO: 24148 - protein, 1186 aa, unidentified
  REGION 1..1186: note = Cas Enzyme sequence
MKKVLGLDLGVASIGWAFIQEDEAKSEILGMGVRIIPLNPDERDEFTAGNAISKNAKRRMKRGMRRNIYRRTLRKDLLRKALLEAGIDPGKDLFEGLSKLSLWELRSKAASEEISLNELGRVLYHLNQKRGFKSNRKTDGAEEDPKKESEYKAEIRKNAQMLEESKQTIGQYMFNELSNDQYFKLKGRIFPRQAYANEFKAIWDCQVKFHSSVLTEELRARIEDEIIFHQRPLKSQKALVSRCEFEKRYAWVNGKKMDVSPRVTPKSSPLAQWSKIYEAVNNIRFKDEYGKPIEVSTDLLAKVSDMLKWKAKMSSNDIIKVLGVPKDSTHNITDKEKGIQGDTTFSAIANAIKGLDGDAELISLLQDFTVNIDLKADEEQTLVDEETGEVFNFYSKRINDSFEKTNYYRLWHLLYSVDNEETLMKNLVEDFNCSFEMARRLVKIDFSKAGFSNKSAAAIKKILPYLMEGNGYSRAMECAGFRHSDYLDKAENEARTLLDKIPLLQKNSLRQPVVEKVLNQLINIVNAIIEHPSYGRPDEIRVELARELKQSKDERNRTSSTISKNEKRNKEIEDRLRKEYGFVKITKSLINKVKIYEEVGGISPYTGKRIALADFLNGAGVDVEHIIPKSRLFDDSLSNKTMAESWVNKAKGNMTAFDFMKAQPIAGLQSFDDYIAMVNLWLKAGANGGKINYTKFQRLICTEKDIPKDFIERQLRQTQYISKKASQVLGLACRNVHATSGGVTDFLREKWGWNDVLKKVNWERYEKLGLTSVETRDDGKRIYNIEGWSKRDDHRHHAIDALVVACTKQSYIQSLNQLNQFVNKTNTATGLKDAEHFKLKDIAGKAPFQVDDIVERASKIIVSFKPGKRVSSKSKNKATGHVSIIPRGALSKETVYGKIKIQSKREVQLNKNFNPEWLIADKFLRVVIRERIKEYNGDLAKAFKSPIFLADGVTAIKKVEIYEWNEEAVVKYPLASIKLKDVEYVVDPAVKQKLQAFFDKYPNEKEAIKNIGTEPVWFNEEKKIPIRTVRLRTGLGKVVPQKQVSPTEAKGFVDSGNNHHLAVYERPDGTLFDVMVSFQEAFERKANGIPLYLNDYEGARLKWKFEQNDLFEIPNAEGKLMYYRMQKISKDSSGAINMMLRLISETNLIDTKETLIMNVYYHIRSIGALQKINPTAVRLNILGDLS

SEQ ID NO: 24149 - protein, 1216 aa, unidentified
  REGION 1..1216: note = Cas Enzyme sequence
MKTILGLDLGTNSIGWALIKQNFENKKGEISGIGSRIIPMSQDILGKFDSGVSISQTAERTAFRGVRRLRERHLLRRERLHRVLNILKFLPDYYASQIDFEKRLGQYKSNTEPKLVYDEQNQFIFKKSFNEMVAEFKKSQPQLFYNKTNGKETLIPYDWTIYYLRKKALSVKIEKEELAWLLLNFNQKRGYFQLRGEDEAEFPNKKVEFHSLKVIDVTADEPQKGKTDIWYNIILENGWIYRRASKLALFDWKNKIKEFVVTTDLNDDGTDKTDKDGKVKRSFRAPAETDWTLVKTKTEQTIDKSNKTVGQYIYGTLLENPTQKINGKLVRVIERKFYKKELEQILKTQLKYHDELKNLELYNACIEELYEHNEAHRNNIAKRDFVHLFLNDIIFYQRPLKSKKSLISDCKFESRKYIKDGIEQNEALKCITKSHPLFQEFRLWQWIQNLHVFEKENNDTPITEKFLKSEDDFVKLFDFLNDRKEIEQEGLIKFLLSPLNLKPKELKLESAKYRWNFVEDKAYPCNETRALMLTKLEKCTSIPNDFLSKETEEALWHILYSVNDKEEIKSALGKFAHKHQLSNDFVEQFMKHPPYKNEYGSYSSKAIKKLLPLMRMGKYWNEENIHPQTKNRIEKIITGEFDDSIRNRVREKAYKLNDINHFRAFPLWLVSYVVYDRHAEDGNLEKWKTPEDLENYLRSFKQHSLRNPIVEQVLTETLRVVKDIWKHYGYSKENFFDEIHIELGREMKNPADKRKKMTEQVTTNENTNLRIKSLLAEMINFKDVENVRPHSPMQQEILKIYEDGVLNSGIDIDEDILKISKTAQPNKADLLRYKLWLEQRYKSPYTGEIIPLNKLFTPAYEIEHIIPQSRYFDDSFSNKVICESEVNKDKDNCLAFEYISNNEGKKIELSVGKFATLFTTEQYEQFIKTNYAKNYSKGKKLMLLDIPEKMIERQMNDTRYISKEVKNLLSKIVRQQNNDEGTTANNLLSTNGQITSALKQDWGLNEIWNELIAPRFERLNEMTNSRNFGDINPNTNKFLPTVPLELQKGFNKKRIDHRHHALDALVIACATRNHINYLNNQNALDKDKKKGQETREDLKRTLCDKKYNADSEKNYRWIFKQPWDTFVLDAKHSLDTTIISFKQNLRVINKTVNKYESYKNEDGTLRLDENGKPVKDIIKQIKGDSWAIRKPLHTPMPYSENKYQFDFLKISENLGN

SEQ ID NO: 24150 - protein, 924 aa, unidentified
  REGION 1..924: note = Cas Enzyme sequence
LDLGETIISESENFFKLWHLLYSVDDKTQIQRSLERWYNVNTASAETISSIPAFKLSYAALSNKAMNKLLPLMRIGKYWSWDSILPSTQVRLQKILDGEFDIEITDQVRGLFIKNNLSQNLDCQGLDTPMAAYAVYGVHSERSQGIYSNPEQVVPKEPLNLRNPVVEQVVNETLRMVRDIWKTYGRPFEIHIELARELKKTRQEREKMSKAMTENEQENKRISSILKELKLGNPNSISDIERLKIWERQAGEAANATKFNVKFKRSSDPTPSEIERYKAWAQQQFISPYSGQPIPISKLFSREYDVDHIIPRSRLFDDSLENKVVVESFLNKEKGNMTALEYIKKGSTMGFVLLNEREYEEHILKFFYRKKRRLLLSEDIPDEFINRQLVDTRYIGRKISELLAPVSENQKDPIIVSNGSVTHELKANWGLSEVMKDLVKWRFERLEEKTGEKFSWYEQETDTERNPTGRKVLRLKGYEKRIDHRHHALDALVVACTTRSHIKYLNDLNKVRPSKVQNPDATTNLQLLLEPGKNGHLQSRKFRMPWNQFRHETKEALSSVIVSFHNRIRIMGRKTNRNQKYVMQPGGSLKKQLVFARDVKGNSKLSPYVRQSLHKATIFGQIQLREYKEVSLAEAFKNTSLIANAGQKKYLSAVLDKSIGDPKKAAKMYKENPLLDDSGIPFQKFMIIQFQPYATSRVDIASGFDLKRIEKIPDRMLQEELRNHISQIENENKDRTKESQIDPFGPEGIQMLNRKRKYPLKKVTTIENPGSKFPIRPGAYTESDKGTNLYFVVYENMSDPLDRQFESIPLRDVVEAKLNGESFVEERVGYRWFLLSPNDLVYMPDKGEIMNRSKVNLDSSKIYKMVSCTGRVCYFLHHSLSKVILDKVEMGSLNKEEKAIDGRMIKQYCQKISLSRLSTLNTKK

SEQ ID NO: 24151 - protein, 1288 aa, unidentified
  REGION 1..1288: note = Cas Enzyme sequence
MCPLSLEDLNNWRHYKKGEGRKYPTNNNKFIEWLRFDFDGDGKPDFERLGFSKHESYYLFRALIVDENKKDIFMNEPHIIGRVLYQMVQRRGYNDSGDIDEKEKNELSKTILKGGGEAGAIGANEIEPYIEKYKTLGAALYYIQKENNVRIRKRYNLRSRVEAELKTICEVQNIPHLFKKIWTAIVWQRPLRSQKGLVGICTFEHNKSRCPISHPLYEEYRTWVFINNLKIRAIDDTKENLPILEILNNIVYPEFYKASADFKLSTIATKLKKVGFEIGSKFPEDTKLISFSFGYKMKNIFGEEWKNILGWNELLANKPKLVTYNLDDLWHLHFVKTTNKKTGITATDFLKQFAIDKLNLTEQHADEFAKIRLSQGYSSLSINAIKKLLPYLQKGFIYSEAVYLANLHKVLNTPILEPAIVNHFSEEINKIFKANKLEKKYLEVINGLINDQLNATHRFGMQENYQLDSDDVNDIDKKIIEVFGVESWYKLESQEKENLMQLVKQKYLNFLQKRVYAKNVFEKSERIHDKVFNWIKETYNIPDNRIKYLWHPSEQETYKEATEINGKKYLGSPEPISKGFKNPMALKTLHKLKQLINYLIDTNKIDEDTRIVIEIARELNDANKRKAIEKWQRDKEAENKKYTEQIIEINNECKTNFNPNDKNLIDKIRLWEEQKRMCLYTGKQINLCDILNGAKYDYEHSIPASMSFDNELKNLTIADKTYNQQIKGKKLPSECPNYDTEFKEYPPILDTIQLVFGKLIKEEIKTKSGIKTISKFQKIIDLEKTYQEWKDKNSDDKEIKNNIIIKRHYLKMELDYWRYKLNTFLITEYKAGWRNSQLRDTQTITKYALPYLKTIFKKVDVQKGSITADFRKIFKIQPRLDKKERTKHSHHAIDAAVLTLIPTASVRDIILSKYNQENENNLPYHELPRNWSSFQSNYILDIEQDLVINYLPEHRTLVPTEKIVRKRGRIQFVKQKLDDGKWRYKLDANGKKIPLVAKGDSIRGQLHKLSNFGAINNGEKIILVERYPIASFTSIADCRNIVDKTVRELVENALYERMQSGMSFDKAKQEPIPFHKGNEVIKKVRCKVAAGRGYLGTDKAIKIGKHNFESKHEYKRSVYVQNEENTYCLYYENTMDGITNRAFKIIGLYELAQLKIKDEKQLLKEPYYNTIIYGKGKKQLELPLVKILKVGTKCIFYSESIEELKDLTKPELLKRLFRIYKFNDIGVTKYIYLQNHLEASKNELLGNGDGQFEKTKYQSRLMLNPDKFICAIEGVHFEIKLDGEIKWF

SEQ ID NO: 24152 - protein, 1394 aa, unidentified
  REGION 1..1394: note = Cas Enzyme sequence
MTTKTILGLDLGTTSIGWAVVKESDDDVSSIKKIGVRVNPLSIDEQTDFEKGKPISVNANRTLKRGARRNLQRYKQRRENLLDALIKSNIISTETILAEDAKGTTHETYLLRAKAVSEKISKEEFARVLLMINKKRGYKSSRKAKNDDEGQAIDGMAVAKRLYAENITPGQLAFQLLKESKKYLPEFYRSDLLSEFNKVWDFQKQFHPEILTDEFKKEIEGKGQRATSASFWNKFKFNIAENKQKTRVEKKLKAYEWRTKAITEKLEKEEVAFVLTEINNDLNKSSGYLGAISDRSKELYFNKQTVGQYLYAQLVANFHTRLKNQVFYRQDYMDEFEMIWEEQAKYHLELTAELKTEIRDIVIFYQRKLKSQKGLISFCEFESKEIEIEKDGKLIKRTVGLKVSPKSSPLFQQVKIWQILHNIEFRNKITKERVFPDLASKQLLFEELNIKGNLTANKITELLGYKTKDWELNYKEVEGNRTSQALYEAYLQILELEGYDEDLFKIAGKDEIKLADINTSSNEIKNMVKTIFETLGIEVSILDFDAEIDGKAFEKQSSFQLWHLLHSYEGDDSNSGNETLYALLNRKFGFKKEHAQILANIIFASDYGSLSAKAMRKIFPYLKENNYSESCKLAGYNHSSSVTKEENEKRPLKGKLELLKKNSLRSPVVEKILNQMVNVVNAIIEDPSLGKPDEIRIELARELKKNSKERAEMTLNINSAKIENEKIRKLLSQEFGVKNPTRNDIIRYKLYEELKGNGYKDLYTNTYIPQEKLFSKDFDIEHIIPQAKLFDDSFSNKTIVPRQVNLDKGNQTAYDFVLGKYGAAALDEYLLRIEMMFKQKEGSISKAKYQKLLKQGKDIGDGFVERDLRETQYIAKKAKQMLEEVCRKVISTTGNVTDRLREDWGLVNVMQELNFEKYKTIGLTELVEKKDGTFKERIKDWSKRNDHRHHAMDALTIAFTKHSHIQYLNHLNARKDEDNKLHNHIIGIENKETELVIEDNGNKKRRFKQPITNFRLEAKKHLESVLISFKAKNKVVTKNKNKIKSKNGEKVKIELTPRGQLHKETVYGKLQQYVTKEEKVGAKFNEEIIKKVANKKQREALMQRLTEHAGDSKKAFTGKNSLDKNPVYLDEQKLQVVPDKVKLVFMEADFAIRKDITPDLKIDKVIDAGVRAILQKRLDEHNGNAKTAFSDLDKNPIWHNQEKGIRIKKVRISGVKNAEALHSKKDHLGNDILDANGKPNATDFVSTGNNHHVAIYRDAEGNLQEKIVSFYEAVERVNQGLPVIDKKYNESLGWEFLFTMKQNEYFVFPSPSFNPTEIDLLDARNNKLISPHLYRVQKIATKNYFFRHHLETNVDEQKELKNIAYINLQSLPHLSKIVKVRINHLGAIVKVGEY

SEQ ID NO: 24153 - protein, 1419 aa, unidentified
  REGION 1..1419: note = Cas Enzyme sequence
MTKTILGLDLGTNSIGWALVKEDFENKQGEILGMGSRIIPMSQDILGDFGKGNSISQTADRTKYRSVRRLRERFLLRRERLHRILNVLDFLPEHYASQIDFEKRLGKFKVETEPKLAWKKNDEKFSFLFKDSFDEMLEDFKVAGQDLKIPYDWTIYYLRKKALTQKIEKEKLAWILLNFNQKRGYYQLRGEEEEENPNKLIEFYSLKIVDVLADESQKGKADIWYSLILENGWVYRRASKTPLFDWKDKIRDFIVTTDLNDDGSIKKDKDGNDKRSFRAPSENDWTLVKKKTEQEIDNSHKTVGTYIYETLLKNPNQKIKGKLVRTIERKFYKDELKQILETQKQFHLELQNDDLLNDCIRELYRNNEAHQLTLSKKDFVHLFMEDLIFYQRPLRSQKSTISNCTLEYRIYKDKDGNKQMQYLKTIPKSNPYYQEFRIWQWIYNLNLYEKDNEQNVTKEFLNTVEDYEKLFEFLNDRKEVDQKALLKHFKLNEKMHRWNFVEDKKYPCNETKTMISSRLDKVENCSDDFLTREMEQKIWHIIYSVNDKIEFEKALKSFAAKNNLDENSFFEAFKKFPPFKSDYGSFSEKAIKKLLPLMRLGKYWNYDAFGHQIKDRIQKIINGEYDENIKDIVREKSVHLTTENHFQGLPLWLAQYIIYGRHSEASSFGRWNSLEDLEVFLNEFKQHSLRNPIVEQVVTETLRVVKDIWQQYGNGAKDFFKEIHIELGREMKLPAEDRKKMTSQMTENENTNLRIKALLAEMLNDHSVENVRPFSPMQQEILKIYEDGVLNSGIEVDEDILKISKTAQPSSSELKRYKLWLEQKYKSPYTGQIIPLNKLFTPEYEIEHIIPQSRYFDDSFSNKVICEAAVNKLKDNCLGFEFIKKLGGTVVECGNGKTVTIFKEIEYEEFVKKHYVNNRSKRNKLLLEDIPEKMIERQLNDTRYISKYISGVLSNIVRVEDGSDEGVNSKNIIPGNGKITTQLKQDWGLNDVWNDLILPRFERMNQLTNSTDYTAWNENHQKFLPTVPIEESKGFSKKRIDHRHHALDALVIACATRYHVNLLNNQSAKSDTKRYDLQHKLRHTEKWQDKNGELKDKFTLFKKPWKTFTQDAINQLEKIVVSFKQNLRVINKATNYYEKFVEKEGAVKKERVQQQGTNWAIRKSMHKETVSGKVDLPWIKVPKGKILTATRKSLDASFDLKSINAITDTGIQKVLKNYLEYKGSPELAFSPEGIDDMNKNIEKYNDGKPHQPIIKVRVFELGSKFQIGQTGNKKHKYVEAAKGTNLFFAVYEDNNGKRSFESIPLNEVIERQKQGLPTVDLKNPNDFYLSPNDLVFMPSEDELENVNRIDFGNLSNEQKNRIYKVVSFTGNRLYCIPCIVATVIVNKVEFTQLNKLEFTREKENCIKLKIDRLGNISKA

SEQ ID NO: 24154 - protein, 905 aa, unidentified
  REGION 1..905: note = Cas Enzyme sequence
VKYKYNFENLEGNRTMAAFIDSFQKIIELSGHDDIDFKKMSGGEKIKTITDIFSMLDFETSILSYSSDIEGKDHMNQPIYQLWHLLYSYEGDNSKSGIESLLTILKTKFGFDKEYASILSNTKLQDDYSSLSAKAIQKILPYLKEGQKYDKACALAGYNHSNSQTTAQLDAKVLKDKLSILSKNSLRNPVVEKILNQMINVVNSVIETYGKPDEIRVEMARELKKGAKERENMTKSMNEANRNHDAIRTTLQTEFGIKNVSRNDVIRYKLYLELKDNGYHTLYSNKYISKEMLFNGEVDIEHIIPQAKLFDDSFSNKTLELRQVNIKKGNLTAIDFVTEEYGEEGLKQYEERVNTLFNKAEKRTKFKKLMWKEEDIPDNFINRDLNDTQYIAKKAKEILEEIVRTVGTTTGSITNRLREDWQLVDVMKELNKPKYQALGLVEEIENRHGHKISKIKDWTKRNDHRHHAMDAITIAFTKPSYIQYLNNLNAKNDKTGVIYAIQNKETYFDKDNKRRFKPPMPLDVFRAKAKDHLENTLISFKAKNKVTTKNKNTTSKAGGQSTVISETPRGQLHLETIYGSSYKYETKIEKVNASFDALKIEKVAKKKYREALLQRLNENDGDSKKAFTGKNSLDNNPIFLDPLHTDFVPDSVKLVWKEQQFTVRKGISPELKIDKVIDKKTREILQKRLDEFNGDPKKAFINLEENPIYLNKERGIVLKSVTITGVSNAIALHNKKDHFGKDVHDADGNTIPVDFVNTGNNHHVAIYRDEKGNLQEEVVSFMEAVTRKNMGLPIVKNKHEKGWEFLFTMKQNEYFIFPNEKTGFNPNEIDIMDVKNYVLISPNVFRVQKLGSKDYWFRHHLETTLIDTADLKEICFKRKQNNNSLIGIVKIRLNNIGHIVQVGEY

SEQ ID NO: 24155 - protein, 1518 aa, unidentified
  REGION 1..1518: note = Cas Enzyme sequence
MKNILGLDLGTNSIGWAMVGSETDSTGKEKLTGIEGNGSRIIPMDAAQLSDFAKGNTISQTADRRLKRSVRRMNERFILRRERLNRVLNLMGFLPEHYAAAIDRYGKFIDDKDHKISWRTNSDGNQEFVYQGAFNEMLAEFASANPKYINNGAKVPYDWTIYYLRKKALYKPVTKQELAWILLNANQKRGYNQLRGVAGEETNEEDSTKNIQYLSAKIISVEDSGEKKGTATWWNCLLDNDMVYKRSSEIKPDWEGKTKEFIVTTDLDGAGKPKMNKYGEVQRHLRMPDEKDWTLIKTKTEDEINTSGEYVGEYIFNALLKNPSQKIRGKLVRTIEREYYRKELKAIIKKQSEFVKELADRDLYERCIEELYPSNISYQKSIASRDFAYLLVDDIILYQRPLKTKKGLIDNCPYEYLSYTDRSTGEIKKAPVKCIAKSHPLFQEFRLWQFVQNLRIYDNETNADVTNQSIPTEYKREDIFKYLNDRVATNEALFLKDCFGIVKPKVKEAKLPFRWNYVEDRDYPCNETRGQMISRLKKAKIDPSFLTLPVEEDLWLILYSSESRDQLKKALIRFAERHHLGEEFVDGFIKFPAFDKDYGAYSAKAIKKLLPLMRMGSYWNENDISAEVRSNIEKIIKGEFAENIPQKVRDSLAAYKQVSDFKGMPLFLACYVVYGRHSEAVDAQKWSEPDDIDRYLSNFKQHSLNNPIVEQVVTETLRVVRDIWKRYGTIDEIHVEMGRDLKSTAEKRRQYQQRALENENTNMRIKALLAEFVNPEFKIEDVRPNSPSQQDILRIYEETVLNSCSEGLPDFVLDVLSNLGSGNASKQPSRSEILKYRLWLEQKYRSPYTGQPIPLGKLFTPAYEIEHVIPQSRYFDDSLNNKVICEAEVNKLKSNMLGHEFISKHGGEVVPLNLGGSVTIMTKDNYEAFVKKYYSNEKMRIKKNNLLLDDIPEQFIARQLNDSRYISRLMLGLLSNIVRKEGENAVSSVNVLSTNGSITDRLKKDWGINDVWNRIILPRFKRMNEIEKTNGFTANSNGHEIPVVPPDLMKGFNKKRIDHRHHAMDAIVIACATRNIINYLNNESACKGAKISRYDLQHLLCDKVVSQNGDYSWVVRAPWKGFQQDVYNSLNNVIVSFKQNLRVINKTTNYYQKFVDGEKKFVRQEKGDSWAIRKSMHKDTVFREVNLRRIHQESLASVISHPNDIVNSDLKEKVNEMIDKGISLSKMKEYFESEKDTWADVDIKKIDAWYFTMEDKDPKTGLPKHRFFSTRKVLDSSFSKKIVKEKITDTAIQKIMLNHLAEHNNDPEIAFNPDGIDQMNDNIVRLNGGRFHQPIFKVPYYEEGNKFSVGQNGAKAKKFVEADKGTNLFFAIYEALIINKKTGEEETVRSYDCIPLNIAIDREKKGLSPAPEDKEGNQPIMVLSPGDLVYVPNKQERESGELSLPIDSNRIYKMISCGQGHCYFIPQNVANVIKDKSEFESQNKSMKTIDGQVYIQKICIPISIDRLGNVIAINGKKI

SEQ ID NO: 24156 - protein, 1516 aa, unidentified
  REGION 1..1516: note = Cas Enzyme sequence
MKNILGLDLGTNSIGWAVVGSVTDAAEKEILAGIKGCGSRIIPMDASQLSDFAKGNTVSQTADRRSKRTARRMNERFILRRERLHRVLNLMGFLPEHYAASLDRYGKFIDADDHKIAWRTNSDGRQEFVYRQAFNEMYEEFKSRNPEFLKNGGKIPYDWTIYYLRKKALYSPITKEELSWILLNANQKRGYNQLMGMDEQQEQEDRSKSVEYLSSTIVEVTDSGDKKGKATWWNCKLDNGMVYKRPSEVKPDWEGKTKEFIITTDLDKDGKPKLNKYGEIQRSFRMPGENDWTLIKTRTEDQVNKSGEFVGEYIFNALLKEPTQKIRGKLVRTIDREFYRAELKAILGKQVGFIKELTDRDLYRQCIEELYPSNDGYRNSIASRDFIYLLADDIILYQRPLKTKKSLIDNCPYESHIYTDKETGEVKTAPVKCIAKSQPLYQEFRLWQFVQNLRIYDNFSGEDETSFVIPTEAKRVEVFKYLNDISSTNQESFFKEFLGVKKPKGKDSKLPYVWNYVEGKDYPCNETRGPILSRLKKSGIPSSFLTRDIENDLWLILYSSESRKELEEALRKFAGKHDLAETFVENFKKFPAFEKDYGAYSAKAIKKLLPLMRMGEFWSETAISDDVKANIENIINGNVSASIPQKVRDQLSSYKSISDFKGLPLYLACYVVYGRHSEASDSQLWTSPEDIDAYLNNFKQHSLHNPIVEQVVTETLRTVRDIWRCFGKIDEIHIEMGRDLKSPADKRRQYQMRALENENTNMRIRALLMEFTNPDFKIDYVRPYSPSQQDLLRIYEETVLNSGEELPDYVVDVLRNLGNGKTEQPTHAEILKYKLWLDQKYRSPYTGQPIPLAKLFTPAYEIEHVIPQARYFDDSYNNKVICESEVNKLKSNMLGHEFIDKHGGEAVSLNMGGTVRILTKDKYEDLVKKIYGNERMRIKFKNLMLDDIPEDFINRQLNDSRYISRLMLGLLSNIVRKEGETEATSRNVIATNGSITDRLKVDWGIKDTWNKILLPRFRRMNEITGTNEYTTINRNGHEIPNVPDYMSKGFIIKRIDHRHHAMDAIVIACASRNIVNYLNNSSACKGAKISRYDLQHLLCNKVLQGDGNYSWVIKTPWTGFQNDVYNALNNIIVSFKQNLRVINKTTNYYQHYEEGKKIIAKQMKGDSWAVRKSMHRDTVFREVNLRMIRQENLKSAIEHLDYIVNRDLKEKLKEFLREGISLAKIKNYFEQEKDTWSEVNLKKIDVYYFTQEDKNPETGLPKHRFFSTRKPIDMSYTEEKIKTQITDTAIQKILLAHLAENGNDPKVAFSPDGIDRMNDNIVRLNNGRMHQPIFKVPYFEEGQKFSVGKVGAKAKKFVEADKGTNIFFAIYENEAEDEETGEIKKVRSFDDIPLNVAIDREKQGLAPAPENGDGMKPIMVLSPGDLVYVPTEEEIKDGKLGPSLDKNRIYKMVSSGQGKCYFIPQSVASVIKDKVEFESGNKSQKTIDGKTSIKEVCYPVKVDRLGHIISINGDMI

SEQ ID NO: 24157 - protein, 1229 aa, unidentified
  REGION 1..1229: note = Cas Enzyme sequence
MKNILGLDLGVTSIGWALVSEDNKGEKKILGMGSRIIPLNIDDQNEFTKGNAISKNQNRTTQRTARKLLDRYQLRRANLQEFLKQNNMLPGSEYNKLNSLELFGLRNKAVSEKITLLELGRVLLHLNQKRGYKSMRGEENQDKKDTEYVAEVKSRYQALKDAKQTIGQHFYQEFQTNQYAIVKHKVFPREAYIEEFEAILAEQKKHHPLLNETTIDNLRDRIVYYQRKLKSQKGLINICEFEGFYAKNKNDKEIFVGPRVAPRSSPIFQTTKIWETINSIRIENKRKDVLVISQEQKHKLYEHLERNEKLTLSELCKILEINKNEWNLNKQLEKRLQGNLTRTKIEAVLQGSEFDYSHLLKFNLSVMDTDKETYLLDKQTGEITEAQQQRKITTDFEKQPFYRLWHTIYSIKETEECKAALIKNFLLDEATAHTLSKLDFTKSGFGNKSVKSMRKILPYLMDGYVYSDATSFAGYNHSNSLTKDENIKRKLLEQLPILQKNSLRQPIVEKILNQLVNVVNNIISQYGKPDEIVIELARELKQSKDERNDTFTYLAKRERENENIRAIIQEYGLRATRNNVIKYRIFREINNDDSKINASCIYCGKAFGLTQALSGDEIDIEHIIPKSILFDDSQSNKTLSHRKCNLDKGNLTAYDFMCTKSEAEFTTYLERVNDLYKQEVIGKGKRDKFLMKAKEIPQDFIERQLNETRYIAKKAKELLEQICYTVYATGGGVTSYLRNIWGYNEVLMNLQLPKYRELGLTEQRTIERPDKSLTQIEVIKDWNKRDDHRHHAIDALVIACTRKGFIQRINTLNASDTRNNMRKDIDALTAYDNKKSLLENYFFSLKPFSTKQVEDNASKILISFKPGKRVATLSKYKAKGINKVKGVIIPRGALSEESVYGKIKSTESKPVKYLFENPHLIFKPYIKVLVEEKLMEHDNNAKLALASLKKEPIYLDEEKTIVLEYGTCFKEEYIIRYPLGPDFSKQEKIIDSRIKSIIQSRLKEHNNDPKKAFKDLENNPVWFNEELQIPIKSVRCFTGLSAVEPLKKDEFGKSVGFVKPGNNHHIGIYLDTEGKKHEHVCSFWHAVERKKYGIDVVIKNAHDVWDTILAHKEDYPQSFLDKLPEDGWILEQSLQQNEMFILGMDKETIDKSIQDKNYQLLSKYLYLTWSISESDYWFRHHLETKNSELKKTSGAAESKRLFRFKSIGAFDKLLPMKIGINNLGQVNLK

SEQ ID NO: 24158 - protein, 1470 aa, unidentified; identical to SEQ ID NO: 22778
  REGION 1..1470: note = Cas Enzyme sequence

SEQ ID NO: 24159 - protein, 1242 aa, unidentified
  REGION 1..1242: note = Cas Enzyme sequence
MAKKILGIDLGVSSIGWALIEEAENENKIISMGVRIIPLSTDETDEFSKGNAITKNQDRTTKRTQRRGYDRYQMRRKALTKVLIENDMFDPELFKLKALELWGLRSKAVNEQISLKELGRVLYHLNQKRGYKSVRKVENEEKKDTKYVEEVKNRYDELKNQGITIGQKFYNELLRDSYYRIKEQVYPREAYIEEFDKIMAYQQKFYPQILTNEIIDKIRNDIIYYQRPLKSQKSLVSVCEFEGKWIKITESKEIFIGPKVAPRTSPLFQVCKIWETINNIEIKNKNGEKYKITIEKKNEIFQFLDNNEKITQKELFKILDLNSSDGWYGNKQIQSGLQGNITKSKILKELKNYSYDNSITDFNIEIEDTGSETYLLDRKTGEIFDFQPRLRVSPNIEKQPLYQLWHVIYSVDDEEECKNVLIKKFGLIEEAAERLARIDFKTPGFGNKSVRAMRNILPYLMKGYHYSDACSLAGYNHSNSLTKDENLQKKLKDKIELLQKNSLRQPVVEKILNQLINLVNAIIDEKQGWVTREERLNNQFEIRIELARELKQTKEERNKTLKNQNDREKQNKIAAERLAEYGLKSTRNNIIKWRLFHEMSGDESKINAQCIYCGKMIGIADALTGNGVDVEHIIPKSLLFDDSQDNKTLSHRACNAEKGNRTAYDYMKAKGEETFNTYVERVKKLYENKLISKSKRDKLLMSEDKIPDDFINRQLRESAYISRKAREILSTVCYNVWSTSGNVTAYLRSIWGWEDALMELEFPKYKEKGLTENVEWDSNGNTHKKEIIKDWAKRDDHRHHAMDALTIACTKQGFIQRINTLSSKKNREEMMAELQQHKIQIHDRLSLLDKYFIAKRPFTTEEVKKKLSQIFVSFKPGKKVATKSVRKVKIHGKKIVVQRNILTPRGPLSEESVYGKIKVVEKDKPLRYLFENPDLIINNVIREKVNERLAQYNNDSKSALKSLKKDPIYLDKDKTLILEKAHCYKEEYVIKYPISSINEKDVDSIIDKKVRELVRQRLNQFYNKPKEAFKEPLYFDDEKRIPIRTVRMFTGLSAVEPIRTDAEGNPIAFVKPGNNHHVGIYIDIEGNYIEHVCTFWHAVERKKYGLPVIIDDTSEIWEKILNSDVKFPQSFLDKLPPDGLKLVISMQQNEMFLFGFSEDETIKYLEDKEYSILSNNLYRVQKISTRNYVFRHHIETSLKDDNISKEMRKFYLFRSLKAFLSAKPLKVYVDALGNMSLSLQHN

SEQ ID NO: 24160 - protein, 1051 aa, unidentified
  REGION 1..1051: note = Cas Enzyme sequence
MGSDQIRTEDLSTAELEQGSGSDIHGWALGLDVGASSLGWMLLRDVPIPDGINAIGGVRIFPEATATEKKVVKSKTEERRMARGMRRQHDRRSRRRRRLTYVLREVGLLPPRPEPIDFVYQLDPYELRARGLDAPLEPHELARAFIHLAQRRGFQSNRRPGAEEKESKKIRQEVEKLRSDMEAAGCRTVGEFLFKCVQPRRERRRGRYLHRIMTREEFNRLWEAQAPFRPDLLTDEARQKVHDAIFFQRPFFNPERIARVVGQCEFEPSEKRAPNAHRLVQRYRIAQEVANIRLIAPDGVERELTPDERRKLREWLEEGSELRLDRDEKRRSKLHSLLGLDESVEVNLAASRRKSLKGNEVDAKFRKALGSTWSALSEEQKNALNELAIEELDDERLAERAQREFGLTADEAKKLTEIILPAGFGRVSLKAIRRLLPHLEEGGSLYDAIVACGYERRHEIDHPCDLLPFPPGTQFAAARQAELVERGLLLPNATPITNPVVRKALFEARKLVNAIIRKYGKPTRIVVEMARDTRLSIDERNELSKEQREREKRNKIIREELVGMGLASPTARDVLKYRLWEECNRTCPYSGRAISFEQLFINGEVDIEHIIPYPRSLDDSFANKTLCFRDWNQKKGDRTPWEAFAQSDPEAYEKMLMRVRAFRSEFRSNKLRRFSQKEADLEGCVARQLNDTRYIAREVRAYLRLLGVPVDVTRGQVTAALRHQWGLNTILSADGSDTKNRADHRHHAVDAAVIAMTTAKHLHNLARSEDFRREREAFPAPWVGFRDAIERAVQGIIVSHTPTRRVRGPLHEETNYGPTGKENSYVYRKPVRELTLNEVRDKIRDRRIRELLEERLDAKWPEWRERPGTDRIPGHVLPENEPLLLPNRHGDPVPVRKVRLVTTISNAIGLPRCTPYRFVKPGENHHLEIFDYVERGKTKREAIAVTLFEAAERVRRHQPVVSRTHPTRPDARFVMSLCKNDMVRRPDGKGGYEYFRVQKFSVASGLNILLRPHTEATLDGNGCSICSWKPDTMLLEKINVTILGEVTPAND

SEQ ID NO: 24161 - protein, 1341 aa, unidentified
  REGION 1..1341: note = Cas Enzyme sequence
MKQILGLDIGVNSIGWAFINEDDNGILQSIEAIGSRIIPEGQEHKDFELGKKISKNAQRRVYRGARRLNYRYKQRRNNIIKICKILGIVPKGLEKLFEKIEISGKNIIIPENVFSKNDKQLDEFEIYRLRAKALNEMISLEELFRIVYHQNQRRGFKSNRKANNLNENEDNNKENINDESSRNKIISFEDVKIVSVEETGEKIKNKTEYLITLEDGRKSKSQKFQFKNYIGSKKILKITKEILKNSDEPKYTFSLASNWQVGRKELNDMILKSGGYPGKYFYEEYLKSIESGNSINFRVKNNIVNRELYLNEFKKIWETQEKLYQKENIDINRIENYEKAISEIIPDNNIIEKQIWIKKGLGEFIRDYIIFYQRGLKSQIKSIGECQFEERIIKITDTSTGEIIEKKIGVKCCPKSHPMFQEFRIWQQIHNLNCKDQNNETIILTDVQKLNLFRYLNGRKVASKKDIEKLLKKQNPDIYLTNLIEGINWCGNKTLYLFKSLFKKYNCENSLIFHDYEKYLRLWHLIYSVEEEKGVETGLKKLDNTLDKELIEELKYLKFEEQQYSSLSLKAIKNLLQLMRIPEDSEQNNLNEKVENRIKDFLSGENQEEFDANTLLKLNEYKSKDKFYGLSYYEAASLIYGKHSAKQLDKYTRYDDIKAIPRNSLRNPVVEQIVNETLMLVRDLWEKYPNLNNGEIRVELARELKSNIEEREKITKSQINRQKINIQISEEIKRQKGDNYVPSLSDIEKVKIWHEAGERSVYTGKSLSISDVLSANTEIDHIIPRSRYYDNSLNNKVICESEINHDKGNMTSFEYMHNSSRCEKLPYEQFLALIMNLRIPYSKRKILTMKEIPDDFINRQIKDTQYISKRVKEELGKIVGVENVKTSTGMVTDYLKDIWGVGELMKKLIEPRFQTLQNRFNIPLIEVVDELDTNDNPTGKKVTRIKGYSKRYDHRNHALDALIVACTKQKIIQQLNLLNKINNGEIKSFVLTVNGSNRKFIPPTGINDKNANIFYDLAKNALNNIIVSYKTNHRFITKGNNWYNKYNSNLRRIVKEKQNNNDDKDIPWAIKRKLHNETKYGIILYDNQYRYVSKCKLINLTENKLKNIADKKIKEEIINHVNKPEYNGHFEKAFNEDGLIEFNEKRKVHIYSVRVMEDGVADKVKGKVPLYTEERKLFVEKEGNLCVSVYEHRESKQRKFDIVSVYDAVNLKAIGENPFQTGKGKKYEQDGYKLLFTLSHYDLVFVPDDEIDISNIDWSDKKYLFNKIYRVVKFSNESTIYFQPHYFAKEIKLNESKATNSRDYKGEFSFNTNGTQYYNTDKLIRNVCYKIYLDRLGNVKI

SEQ ID NO: 24162 - protein, 1313 aa, unidentified
  REGION 1..1313: note = Cas Enzyme sequence
MKHIIGIDAGTNSTGWTLTRENDDKTIDLIDIGTYIFPIGTIIDEQKGTEKTKNEQRRIYRGSKRKLFRYKLRRKNLKKILCDLKMLPDFDKYTRQKEHYQSYELYENRARALDKQIDLKEIGRIFLLINKHRGFLSNAKKKIVEEENNKETEKEQRKVSEGINSLTDLMNKANARTIGEYFYKMHLKAKENYEKDQWHNPNEPIDERAYNENGELIIYNSRGIRRQYGRYTSREMYEKEFDLIWETQKKYYDEVDTTIFTGSRKEWNEIKLLPYEAKKTRMTNFKKTNYWLIRNYCLFYQRPLKSQKKFVSKCQFEKNKTVIPASSPLYQEFRIWKNISDLRYNCKETDTYNKPLPIEWKRIIANYLEVNEIIYIAKTPRSKKGKKYLVDILPNVLPSTEIKTEDLESEKYIKGNQTYTAFYNVLREKVYSEYKFNNKLYQLWEYIYMAKDDDWLKDILAYKWKMNEEKINDLLIYDMEEGYGSYSTKVIKKILPFMKEGNDEHSSLVIAGYLEENNKLKDIIPLKKHVSQLKYQELRNPVVEKAVSQVIKIVNAILDKYDNVIDREKLEIHIETTRELKKPRKEREKLRSEISNKDKARQELADFLNMKKEKGELNFSGRIEKYDSIIKKYELWLELGMDKNDPAFNEFVIQKDALEKLRLWKECNRICPYSGRTISLTLLFSPEIEIEHIIPLSRCLNDSFNNKTITFSDINRLKNKQTSYEYMKSINKFDEFESRIKKLKNSFSAQKIEQFLRQDIEYDFTNNQLTNTSYIARYVRKKMHEVCRNIQFTNGFATAELRNIDWTLSDLLDKIKFEESTGTEDIDYIIDMYRKYKKEFDKWYESKQKSTDIRMIGLKNLSEKLLEQFKSEKGINLQYYAKILAEYVNYKNGNKTNKDRTDYRNHAIDAFIIAACTNYTTNILSRYNREREEMKLPFYDENGNPSRKRIKLLFNYSQLKAKVKNILVCHNVNQKLMSSKKDKNRKLETASDKLYSPQGSLHNDGIYGKLKNPRKQGFERDDVYVKRISLYDQESKSISISSEKGLENIYDPTVKKILYDRICKYGSGIKAFSKESLEKDPIYIHSLKMNGQNNSISKKGKPLPAMKNVRKANKNVRNLISIPVKDEQNNKLGNKYVETSDNYLMVFYNLEKTDLKGKNSVLREFKLLSFSEAINRKRNKEKMFEDVYYNKKDDIYIPLQKECSWLKKGDSVILFEKTKNEIQWSDKEDLKKRLFIVKGLDSGIPNKKYPNNEYGYVNLLRHSHTGKSITFTSEDFCILRNQKAIRNSHKQINAIKVRMTPLGEISLIGEECF

SEQ ID NO: 24163 - protein, 1052 aa, unidentified
  REGION 1..1052: note = Cas Enzyme sequence
MGSDQIRTEDLSTAELEQGSGSDIHGWALGLDVGASSLGWMLLRDVPIPDGINAIGGVRIFPEATATEKKVVKSKTEERRMARGMRRQHDRRSRRRRRLTYVLREVGLLPPRPEPIDFVYQLDPYELRARGLDAPLEPHELARAFIHLAQRRGFQSNRRPGAEEKESKKIRQEVEKLRSDMEAAGCRTVGEFLFKCVQPRRERRRGRYLHRIMTREEFNRLWEAQAPFRPDLLTDEARQKVHDAIFFQRPFFNPERIARVVGQCEFEPSEKRAPNAHRLVQRYRIAQEVANIRLIAPDGVERELTPDERRKLREWLEEGSELRLDRDEKGRSKLHSLLGLDESVEVNLAASRRKSLKGNEVDAKFRKALGSTWSALSEEQKNALNELAIEELDDERLAERAQGEFGLTADEAKKLTEIILPAGFGRVSLKAIRRLLPHLEEGRSLHDAIVACGYERRHEIDHPCDLLPFPPGTQFAAARQAELVERGLLLPNATPITNPVVRKALFEARKLVNAIIRKYGKPTRIVVEMARDTRLSIDERNELSKEQREREKRNKIIREELVGMGLASPTARDVLKYRLWEECNRTCPYSGRAISFEQLFINGEVDIEHIIPYPRSLDDSFANKTLCFRDWNQKKGDRTPWEAFAQSDPEAYEKMLMRVRAFRSEFRSNKLRRFSQKEADLEGCVARQLNDTRYIAREVRAYLRLLGVPVDVTRGQVTAALRHQWGLNTILSADGSDTKNRADHRHHAVDAAVIAMTTAKHLHNLARSEDFRREREAFPAPWVGFRDAIERAVQGIIVSHTPTRRVRGPLHEETNYGPTGKENSYVYRKPVRELTLNEVRDKIRDRRIRELLEERLDAKWPEWRERPGTDRIPGHVLPENEPLLLPNRHGDPVPVRKVRLVTTISNAIGLPRCTPYRFVKPGENHHLEIFDYVERGKTKREAIAVTLFEAAERVRRHLPVVSRTHPTRPDARFVMSLCKNDMVRRPDGKGGYEYFRVQKFSVASALDLSLQPHTEATSDKKKACRINSWAPGTMLLEKINVTVLGEVTPAND

SEQ ID NO: 24164 - protein, 1229 aa, unidentified
  REGION 1..1229: note = Cas Enzyme sequence
MKNILGLDLGVTSIGWALVSEDNKGEKKILGMGSRIIPLNIDDQNEFTKGNAISKNQNRTTQRTARKLLDRYQLRRANLQEFLKQNNMLPGSEYNKLNSLELFGLRNKAVSEKITLLELGRVLLHLNQKRGYKSMRGEENQDKKDTEYVAEVKSRYQALKDAKQTIGQHFYQEFQTNQYAIVKHKVFPREAYIEEFEAILAEQKKHHPLLNETTIDNLRDRIVYYQRKLKSQKGLINICEFEGFYAKNKNDKEIFVGPRVAPRSSPIFQTTKIWETINSIRIENKRKDVLVISQEQKHKLYEHLERNEKLTLSELCKILEINKNEWNLNKQLEKGLQGNLTRTKIEAVLQGSEFDYSHLLKFNLSVMDTDKETYLLDKQTGEITEAQQQRKITTDFEKQPFYRLWHTIYSIKETEECKAALIKNFLLDEATAHTLSKLDFTKSGFGNKSVKSMRKILPYLMDGYVYSDATSFAGYNHSNSLTKDENIKRKLLEQLPILQKNSLRQPIVEKILNQLVNVVNNIINQYGKPDEIVIELARELKQSKDERNDTFTYLAKRERENENIRAIIQEYGLRATRNNVIKYRIFREINNDDSKINASCIYCGKAFGLTQALSGDEIDIEHIIPKSILFDDSQSNKTLSHRKCNLDKGNLTAYDFMCTKSEAEFTTYLERVNDLYKQKVIGKGKRDKFLMKAKEIPQDFIERQLNETRYIAKKAKELLEHICYTVYATGGGVTSYLRNIWGYNEVLMNLQLPKYRELGLTEQRTIERPDKTLTQIEVIKDWNKRDDHRHHAIDALVIACTRKGFIQRINTLNASDTRNNMRKDIDALTAYDNKKSLLENYFFSLKPFSTKQVEDNASKILISFKPGKRVATLSKYKAKGINKVKGVIIPRGALSEESVYGKIKSTESKPVKYLFENPHLIFKPYIKVLVEEKLMEHDNNAKLALASLKKEPIYLDEEKTIVLEYGTCFKEEYIIRYPLGPDFSKQEKIIDSRIKSIIQSRLKEHNNDPKKAFKDLENNPVWFNEELQIPIKSVRCFTGLSAVEPLKKDEFGKSVGFVKPGNNHHIGIYLDTEGKKHEHVCSFWHAVERKKYGIDVVIKNAHDVWDTILAHKEDYPQSFLDKLPEDGWILEQSLQQNEMFILGMDKETIDKSIQDKNYQLLSKYLYLTWSISESDYWFRHHLETKNSELKKTSGAAESKRLFRFKSIGAFDKLLPMKIGINNLGQVNLK

SEQ ID NO: 24165 - protein, 1361 aa, unidentified
  REGION 1..1361: note = Cas Enzyme sequence
MKKILGLDLGTTSIGWSFINEAENEDEASSIIDTGVRIVPLTTDEEADFKKGNTISINADRTLKRGARRGLQRFKQRRSALLEIFTKVKFIPTDFIYAETGSATTFSSYQLRAKSATEAISKEELVQVLLMLNKKRGYKSSRKAKTAEEGDAIDGMKIAKEIFENNLTPGQWVYNSLLKGGKFIPDFYRSDLHKELEKIVRFQNQFHPEQMNDKLVENIQGKSRTVTSQYFSKTLNIPLAENKGNREETKLKHYEWRNNALSNELDLKILAFIITEINNQIIQSSGYLGAISDRSKELYFNQETVGQFQYKQLEKNSHTKLKNQVFYRQDYLDEFEKIWETQAKYHPELNEKLKSEVRDITIFYQRKLKSQKHLVSFCEFEKGHKAIPKSSPLFQEFRIWQNINNIEFKKEKEVYPLGEELKQIISQDLLLKENMTDAQFIKFIINQCKLEKGNYSINFKKIEGNRTNTEIYKAFEKILVLEGYDELDLSKLEAFDIKNIIKSAFFDLGINTNILDFDPNIQGDNFDKQPYYQLWHLLYSAEDDDKLKESLKAKFGFKENHLPFLLNISLQADYGSLSAKAIKKVLPHLMDGQIYDKACLMTGYNHSSSLTTEQNNERVLKNTLELLKKNSLRNPVVEKILNQMINVINAIIKDPAMGKPDEIRVELARELKNNNEQRSEMTKAINKSTAEHEQIRKLLHTEFGIHRVTRNDIIRYKLWKESDGISLYTGKPIEPSKLFSKEYDIEHIIPKSRLFDDSFSNKTICERQLNIDKSNKTAYSFLKEKLSPEDFDQFEKRVKSLFGKISRTKQIKLLMADNEIPEGFIDRQLRETQYIAKKAKEILLEVSRNVTATIGSVTDKLREDWELVDVMKELNWEKYDKLGLTHIEEGKKGERLYKIKDWTKRNDHRHHAMDAITVAFTKPAYIQYLNNLNAKTQGENKAGAIYGIETKNLERDKNNKLRFKAPMKNFREEAKKQLENILISYKTKNKVVTKNKNVTKKSGGTNQRIQLTPRGQLHKETVYGKLQQYVTKEESVNAKFTEEYIQKVAKKEYREALLKRLQQNGNDPKKAFTGKNALNKMPVYVSLKDNIVVPEKVKIVWFEDNYTIRKDITPDNFKDLKSIAKVIDSGLKTILENRLAEFDNDPKKAFVNLDENPIWQNKEKGIAIKRVTISGVSNAQALHTKKDHFGNEILDENGNTIPVDFVSTGNNHHVAIYKDEKGNLQEEVVSFYDAVVRRNLGFSVINKTHEMGWKFLFSMKQNELFIFPSESCNPLEMDLLNPNNYHLISPNIFRVQSLSVVQYGNSTIRDFKFRHHLETTVEDKKELTNITYKQIKSLTPLNEIIKVRINHLGKIVHVGEY

SEQ ID NO: 24166 - DNA, 33 bp, synthetic construct
  misc_feature 1..33: note = Synthetic oligonucleotide
  source 1..33: mol_type = other DNA
aaaaaaatgattacctttgcagagacatcaaca

SEQ ID NO: 24167 - DNA, 31 bp, synthetic construct
  misc_feature 1..31: note = Synthetic oligonucleotide
  source 1..31: mol_type = other DNA
aaaaagtgtaaaaaaagtgtaagctttttgc

SEQ ID NO: 24168 - DNA, 31 bp, synthetic construct
  misc_feature 1..31: note = Synthetic oligonucleotide
  source 1..31: mol_type = other DNA
aaaaccacaaaatttgaaagcaattcacaac

SEQ ID NO: 24169 - DNA, 31 bp, synthetic construct; identical to SEQ ID NO: 24168
  misc_feature 1..31: note = Synthetic oligonucleotide
  source 1..31: mol_type = other DNA

SEQ ID NO: 24170 - DNA, 20 bp, synthetic construct
  misc_feature 1..20: note = Synthetic oligonucleotide
  source 1..20: mol_type = other DNA
aaaacgcacagctctcaaac

SEQ ID NO: 24171 - DNA, 20 bp, synthetic construct
  misc_feature 1..20: note = Synthetic oligonucleotide
  source 1..20: mol_type = other DNA
aaaacgcacagctctcaaac

SEQ ID NO: 24172 - DNA, 20 bp, synthetic construct
  misc_feature 1..20: note = Synthetic oligonucleotide
  source 1..20: mol_type = other DNA
aaaacgcacagctctcaaac

SEQ ID NO: 24173 - DNA, 20 bp, synthetic construct
  misc_feature 1..20: note = Synthetic oligonucleotide
  source 1..20: mol_type = other DNA
aaaacgcacagctctcaaac

SEQ ID NO: 24174 - DNA, 20 bp, synthetic construct
  misc_feature 1..20: note = Synthetic oligonucleotide
  source 1..20: mol_type = other DNA
aaaacgcacagctctcaaac

SEQ ID NO: 24175 - DNA, 20 bp, synthetic construct
  misc_feature 1..20: note = Synthetic oligonucleotide
  source 1..20: mol_type = other DNA
aaaacgcacagctctcaaac

SEQ ID NO: 24176 - DNA, 31 bp, synthetic construct
  misc_feature 1..31: note = Synthetic oligonucleotide
  source 1..31: mol_type = other DNA
aaaactacaaaatttgaaaacaattcacaac

SEQ ID NO: 24177 - DNA, 31 bp, synthetic construct
  misc_feature 1..31: note = Synthetic oligonucleotide
  source 1..31: mol_type = other DNA
aaaactacaaaatttgaaagcaattcacaac

SEQ ID NO: 24178 - DNA, 19 bp, synthetic construct
  misc_feature 1..19: note = Synthetic oligonucleotide
  source 1..19: mol_type = other DNA
aaaagcgaaccgcagattc

SEQ ID NO: 24179 - DNA, 36 bp, synthetic construct
  misc_feature 1..36: note = Synthetic oligonucleotide
  source 1..36: mol_type = other DNA
aaaatatcagagattaattagacggtcaactataac

SEQ ID NO: 24180 - DNA, 23 bp, synthetic construct
  misc_feature 1..23: note = Synthetic oligonucleotide
  source 1..23: mol_type = other DNA
aaaatttgaaagcaattcacaac

SEQ ID NO: 24181 - DNA, 20 bp, synthetic construct
  misc_feature 1..20: note = Synthetic oligonucleotide
  source 1..20: mol_type = other DNA
aaaccaagcagtagttcacc

SEQ ID NO: 24182 - DNA, 36 bp, synthetic construct
  misc_feature 1..36: note = Synthetic oligonucleotide
  source 1..36: mol_type = other DNA
aaaccgtttccttactccacaacgcgcaatgggaac

SEQ ID NO: 24183 - DNA, 30 bp, synthetic construct
  misc_feature 1..30: note = Synthetic oligonucleotide
  source 1..30: mol_type = other DNA
aaactacaaaatttgaaagcaattcacaac

SEQ ID NO: 24184 - DNA, 30 bp, synthetic construct
  misc_feature 1..30: note = Synthetic oligonucleotide
  source 1..30: mol_type = other DNA
aaactacaaaatttggaagcaattcacaac

SEQ ID NO: 24185 - DNA, 30 bp, synthetic construct; identical to SEQ ID NO: 24184
  misc_feature 1..30: note = Synthetic oligonucleotide
  source 1..30: mol_type = other DNA

SEQ ID NO: 24186 - DNA, 29 bp, synthetic construct
  misc_feature 1..29: note = Synthetic oligonucleotide
  source 1..29: mol_type = other DNA
aaagatactaattcgaaagcaaatcacaa

SEQ ID NO: 24187 - DNA, 20 bp, synthetic construct
  misc_feature 1..20: note = Synthetic oligonucleotide
  source 1..20: mol_type = other DNA
aaagcaaatgattccaaatg

SEQ ID NO: 24188 - DNA, 20 bp, synthetic construct
  misc_feature 1..20: note = Synthetic oligonucleotide
  source 1..20: mol_type = other DNA
aaagcaaatgattccaaatg

SEQ ID NO: 24189 - DNA, 20 bp, synthetic construct
  misc_feature 1..20: note = Synthetic oligonucleotide
  source 1..20: mol_type = other DNA
aaagcaaatgattccaaatg

SEQ ID NO: 24190 - DNA, 36 bp, synthetic construct; identical to SEQ ID NO: 10489
  misc_feature 1..36: note = Synthetic oligonucleotide
  source 1..36: mol_type = other DNA

SEQ ID NO: 24191 - DNA, 36 bp, synthetic construct
  misc_feature 1..36: note = Synthetic oligonucleotide
  source 1..36: mol_type = other DNA
aaagtatcagagattaactagacggtcaactataac

SEQ ID NO: 24192 - DNA, 36 bp, synthetic construct; identical to SEQ ID NO: 24191
  misc_feature 1..36: note = Synthetic oligonucleotide
  source 1..36: mol_type = other DNA

SEQ ID NO: 24193 - DNA, 36 bp, synthetic construct; identical to SEQ ID NO: 24191
  misc_feature 1..36: note = Synthetic oligonucleotide
  source 1..36: mol_type = other DNA

SEQ ID NO: 24194 - DNA, 36 bp, synthetic construct; identical to SEQ ID NO: 24191
  misc_feature 1..36: note = Synthetic oligonucleotide
  source 1..36: mol_type = other DNA

SEQ ID NO: 24195 - DNA, 36 bp, synthetic construct
  misc_feature 1..36: note = Synthetic oligonucleotide
  source 1..36: mol_type = other DNA
aaagtatcagagattaattagacggtcaactataac

SEQ ID NO: 24196 - DNA, 36 bp, synthetic construct; identical to SEQ ID NO: 24195
  misc_feature 1..36: note = Synthetic oligonucleotide
  source 1..36: mol_type = other DNA

SEQ ID NO: 24197 - DNA, 36 bp, synthetic construct; identical to SEQ ID NO: 24195
  misc_feature 1..36: note = Synthetic oligonucleotide
  source 1..36: mol_type = other DNA

SEQ ID NO: 24198 - DNA, 36 bp, synthetic construct; identical to SEQ ID NO: 24195
  misc_feature 1..36: note = Synthetic oligonucleotide
  source 1..36: mol_type = other DNA

SEQ ID NO: 24199 - DNA, 36 bp, synthetic construct; identical to SEQ ID NO: 24195
  misc_feature 1..36: note = Synthetic oligonucleotide
  source 1..36: mol_type = other DNA

SEQ ID NO: 24200 - DNA, 36 bp, synthetic construct; identical to SEQ ID NO: 24195
  misc_feature 1..36: note = Synthetic oligonucleotide
  source 1..36: mol_type = other DNA

SEQ ID NO: 24201 - DNA, 36 bp, synthetic construct; identical to SEQ ID NO: 24195
  misc_feature 1..36: note = Synthetic oligonucleotide
  source 1..36: mol_type = other DNA

SEQ ID NO: 24202 - DNA, 36 bp, synthetic construct; identical to SEQ ID NO: 24195
  misc_feature 1..36: note = Synthetic oligonucleotide
  source 1..36: mol_type = other DNA

SEQ ID NO: 24203 - DNA, 36 bp, synthetic construct; identical to SEQ ID NO: 24195
  misc_feature 1..36: note = Synthetic oligonucleotide
  source 1..36: mol_type = other DNA

SEQ ID NO: 24204 - DNA, 38 bp, synthetic construct
  misc_feature 1..38: note = Synthetic oligonucleotide
  source 1..38: mol_type = other DNA
aaagtatcagagattaattagacggtcaactataacgt

SEQ ID NO: 24205 - DNA, 30 bp, synthetic construct; identical to SEQ ID NO: 10491
  misc_feature 1..30: note = Synthetic oligonucleotide
  source 1..30: mol_type = other DNA

SEQ ID NO: 24206 - DNA, 30 bp, synthetic construct; identical to SEQ ID NO: 10491
  misc_feature 1..30: note = Synthetic oligonucleotide
  source 1..30: mol_type = other DNA

SEQ ID NO: 24207 - DNA, 35 bp, synthetic construct
  misc_feature 1..35: note = Synthetic oligonucleotide
  source 1..35: mol_type = other DNA
aaatatcagagattaattagacggtcaactataac

SEQ ID NO: 24208 - DNA, 37 bp, synthetic construct
  misc_feature 1..37: note = Synthetic oligonucleotide
  source 1..37: mol_type = other DNA
aaatatcgtgtttcctaattcttaatcaaactacaac

SEQ ID NO: 24209 - DNA, 37 bp, synthetic construct
  misc_feature 1..37: note = Synthetic oligonucleotide
  source 1..37: mol_type = other DNA
aaatatcgttttctctaatctttaatcaaaccacaac

SEQ ID NO: 24210 - DNA, 36 bp, synthetic construct
  misc_feature 1..36: note = Synthetic oligonucleotide
  source 1..36: mol_type = other DNA
aaatcactctataagggtttggtgtcaagctgtaac

SEQ ID NO: 24211 - DNA, 31 bp, synthetic construct
  misc_feature 1..31: note = Synthetic oligonucleotide
  source 1..31: mol_type = other DNA
aaatggtatctttacactatcatagacaaca

SEQ ID NO: 24212 - DNA, 31 bp, synthetic construct; identical to SEQ ID NO: 24211
  misc_feature 1..31: note = Synthetic oligonucleotide
  source 1..31: mol_type = other DNA

SEQ ID NO: 24213 - DNA, 31 bp, synthetic construct; identical to SEQ ID NO: 24211
  misc_feature 1..31: note = Synthetic oligonucleotide
  source 1..31: mol_type = other DNA

SEQ ID NO: 24214 - DNA, 32 bp, synthetic construct
  misc_feature 1..32: note = Synthetic oligonucleotide
  source 1..32: mol_type = other DNA
aaattagtatctttgatccattggaaacagct

SEQ ID NO: 24215 - DNA, 32 bp, synthetic construct; identical to SEQ ID NO: 24214
  misc_feature 1..32: note = Synthetic oligonucleotide
  source 1..32: mol_type = other DNA

SEQ ID NO: 24216 - DNA, 33 bp, synthetic construct
  misc_feature 1..33: note = Synthetic oligonucleotide
  source 1..33: mol_type = other DNA
aaattctttaactttgtggatacatcacagctt

SEQ ID NO: 24217 - DNA, 30 bp, synthetic construct
  misc_feature 1..30: note = Synthetic oligonucleotide
  source 1..30: mol_type = other DNA
aaatttattatcttcgtgacaggtcacaac

SEQ ID NO: 24218 - DNA, 30 bp, synthetic construct
  misc_feature 1..30: note = Synthetic oligonucleotide
  source 1..30: mol_type = other DNA
aaattttgtagttttgcgattgataacaac

SEQ ID NO: 24219 - DNA, 33 bp, synthetic construct
  misc_feature 1..33: note = Synthetic oligonucleotide
  source 1..33: mol_type = other DNA
aacaaagataagaattttaaagcaaatcacaac

SEQ ID NO: 24220 - DNA, 33 bp, synthetic construct; identical to SEQ ID NO: 24219
  misc_feature 1..33: note = Synthetic oligonucleotide
  source 1..33: mol_type = other DNA

SEQ ID NO: 24221 - DNA, 20 bp, synthetic construct
  misc_feature 1..20: note = Synthetic oligonucleotide
  source 1..20: mol_type = other DNA
aacatgggatgtattgaaat

SEQ ID NO: 24222 - DNA, 36 bp, synthetic construct
  misc_feature 1..36: note = Synthetic oligonucleotide
  source 1..36: mol_type = other DNA
aacctaccacagggaaatcggtagggaaaccacggc

SEQ ID NO: 24223 - DNA, 36 bp, synthetic construct
  misc_feature 1..36: note = Synthetic oligonucleotide
  source 1..36: mol_type = other DNA
aacctaccacgggcaaatcggtagggaaaccacggc

SEQ ID NO: 24224 - DNA, 36 bp, synthetic construct; identical to SEQ ID NO: 24223
  misc_feature 1..36: note = Synthetic oligonucleotide
  source 1..36: mol_type = other DNA

SEQ ID NO: 24225 - DNA, 36 bp, synthetic construct
  misc_feature 1..36: note = Synthetic oligonucleotide
  source 1..36: mol_type = other DNA
aacctaccacggggaaatcggtagggaagccacggc

SEQ ID NO: 24226 - DNA, 36 bp, synthetic construct
  misc_feature 1..36: note = Synthetic oligonucleotide
  source 1..36: mol_type = other DNA
aacctaccatgggcaaatcggtagggaaaccacggc

SEQ ID NO: 24227 - DNA, 36 bp, synthetic construct
  misc_feature 1..36: note = Synthetic oligonucleotide
  source 1..36: mol_type = other DNA
aactcagtttactagaaaaagtggtcggcctgcaac

SEQ ID NO: 24228 - DNA, 23 bp, synthetic construct
  misc_feature 1..23: note = Synthetic oligonucleotide
  source 1..23: mol_type = other DNA
aagaagcccgcggcaaagaaggc

SEQ ID NO: 24229 - DNA, 37 bp, synthetic construct
  misc_feature 1..37: note = Synthetic oligonucleotide
  source 1..37: mol_type = other DNA
aagagtagcagatcaggaattgcacactctcggaaac

SEQ ID NO: 24230 - DNA, 34 bp, synthetic construct
  misc_feature 1..34: note = Synthetic oligonucleotide
  source 1..34: mol_type = other DNA
aagcaaagttactaaatttaaagcaaataacaac

SEQ ID NO: 24231 - DNA, 38 bp, synthetic construct
  misc_feature 1..38: note = Synthetic oligonucleotide
  source 1..38: mol_type = other DNA
aagctcttgaccttattgatttgctactaatctaaagc

SEQ ID NO: 24232 - DNA, 35 bp, synthetic construct
  misc_feature 1..35: note = Synthetic oligonucleotide
  source 1..35: mol_type = other DNA
aagcttatcaagaagggtgaatgctaattcccagc

SEQ ID NO: 24233 - DNA, 21 bp, synthetic construct
  misc_feature 1..21: note = Synthetic oligonucleotide
  source 1..21: mol_type = other DNA
aaggagtgcgtggattgaaac

SEQ ID NO: 24234 - DNA, 36 bp, synthetic construct
  misc_feature 1..36: note = Synthetic oligonucleotide
  source 1..36: mol_type = other DNA
aagtatatcaggggggagaggtgattgattcccagc

SEQ ID NO: 24235 - DNA, 36 bp, synthetic construct; identical to SEQ ID NO: 24234
  misc_feature 1..36: note = Synthetic oligonucleotide
  source 1..36: mol_type = other DNA

SEQ ID NO: 24236 - DNA, 37 bp, synthetic construct
  misc_feature 1..37: note = Synthetic oligonucleotide
  source 1..37: mol_type = other DNA
aagtatatcaggggggagaggtgattgattcccagcc

SEQ ID NO: 24237 - DNA, 37 bp, synthetic construct
  misc_feature 1..37: note = Synthetic oligonucleotide
  source 1..37: mol_type = other DNA
aagtctatcaaagccgcgattcccggccatccaaagc

SEQ ID NO: 24238 - DNA, 37 bp, synthetic construct
  misc_feature 1..37: note = Synthetic oligonucleotide
  source 1..37: mol_type = other DNA
aagtctatcaaagctgcgattcccggccatccagaac

SEQ ID NO: 24239 - DNA, 37 bp, synthetic construct
  misc_feature 1..37: note = Synthetic oligonucleotide
  source 1..37: mol_type = other DNA
aagtgcaaagatagtaaaactgaaagcaaatcacaac

SEQ ID NO: 24240 - DNA, 37 bp, synthetic construct
  misc_feature 1..37: note = Synthetic oligonucleotide
  source 1..37: mol_type = other DNA
aagtgtaatcgaccccggcctgggagcaatccgcaac

SEQ ID NO: 24241 - DNA, 37 bp, synthetic construct
  misc_feature 1..37: note = Synthetic oligonucleotide
  source 1..37: mol_type = other DNA
aagtgtacttgagcggcgattcccggccatccccagc

SEQ ID NO: 24242 - DNA, 37 bp, synthetic construct
  misc_feature 1..37: note = Synthetic oligonucleotide
  source 1..37: mol_type = other DNA
aagtgtagccatccggggtgagagagggagctacaac

SEQ ID NO: 24243 - DNA, 36 bp, synthetic construct; identical to SEQ ID NO: 10497
  misc_feature 1..36: note = Synthetic oligonucleotide
  source 1..36: mol_type = other DNA

SEQ ID NO: 24244 - DNA, 36 bp, synthetic construct; identical to SEQ ID NO: 10497
  misc_feature 1..36: note = Synthetic oligonucleotide
  source 1..36: mol_type = other DNA

SEQ ID NO: 24245 - DNA, 36 bp, synthetic construct; identical to SEQ ID NO: 10497
  misc_feature 1..36: note = Synthetic oligonucleotide
  source 1..36: mol_type = other DNA

SEQ ID NO: 24246 - DNA, 36 bp, synthetic construct; identical to SEQ ID NO: 10497
  misc_feature 1..36: note = Synthetic oligonucleotide
  source 1..36: mol_type = other DNA

SEQ ID NO: 24247 - DNA, 36 bp, synthetic construct; identical to SEQ ID NO: 10497
  misc_feature 1..36: note = Synthetic oligonucleotide
  source 1..36: mol_type = other DNA

SEQ ID NO: 24248 - DNA, 36 bp, synthetic construct; identical to SEQ ID NO: 10497
  misc_feature 1..36: note = Synthetic oligonucleotide
  source 1..36: mol_type = other DNA

SEQ ID NO: 24249 - DNA, 36 bp, synthetic construct; identical to SEQ ID NO: 10497
  misc_feature 1..36: note = Synthetic oligonucleotide
  source 1..36: mol_type = other DNA

SEQ ID NO: 24250 - DNA, 37 bp, synthetic construct
  misc_feature 1..37: note = Synthetic oligonucleotide
  source 1..37: mol_type = other DNA
aagtgtgaaggtacggaatctgaaagctaatcacaac

SEQ ID NO: 24251 - DNA, 30 bp, synthetic construct
  misc_feature 1..30: note = Synthetic oligonucleotide
  source 1..30: mol_type = other DNA
aagttacttaaattgaaagctaattacaac

SEQ ID NO: 24252 - DNA, 36 bp, synthetic construct
  misc_feature 1..36: note = Synthetic oligonucleotide
  source 1..36: mol_type = other DNA
aagttagccgatggggaaacgcggtcgagccgcaac

SEQ ID NO: 24253 - DNA, 38 bp, synthetic construct; identical to SEQ ID NO: 10499
  misc_feature 1..38: note = Synthetic oligonucleotide
  source 1..38: mol_type = other DNA

SEQ ID NO: 24254 - DNA, 31 bp, synthetic construct
  misc_feature 1..31: note = Synthetic oligonucleotide
  source 1..31: mol_type = other DNA
aatacagcttactcaaaaaaatggtctgcct

SEQ ID NO: 24255 - DNA, 36 bp, synthetic construct
  misc_feature 1..36: note = Synthetic oligonucleotide
  source 1..36: mol_type = other DNA
aataccacaatgccccggggggggcgagatcaaaac

SEQ ID NO: 24256 - DNA, 36 bp, synthetic construct; identical to SEQ ID NO: 24255
  misc_feature 1..36: note = Synthetic oligonucleotide
  source 1..36: mol_type = other DNA

SEQ ID NO: 24257 - DNA, 31 bp, synthetic construct
  misc_feature 1..31: note = Synthetic oligonucleotide
  source 1..31: mol_type = other DNA
aataccattcaatattacatatctctaaaac

SEQ ID NO: 24258 - DNA, 36 bp, synthetic construct
  misc_feature 1..36: note = Synthetic oligonucleotide
  source 1..36: mol_type = other DNA
aatagcagagtgccccgatgggggcacgatcaaaac

SEQ ID NO: 24259 - DNA, 36 bp, synthetic construct
  misc_feature 1..36: note = Synthetic oligonucleotide
  source 1..36: mol_type = other DNA
aatatagcacacttcaaaaaaacatcaaatcacaac

SEQ ID NO: 24260 - DNA, 36 bp, synthetic construct; identical to SEQ ID NO: 24259
  misc_feature 1..36: note = Synthetic oligonucleotide
  source 1..36: mol_type = other DNA

SEQ ID NO: 24261 - DNA, 36 bp, synthetic construct
  misc_feature 1..36: note = Synthetic oligonucleotide
  source 1..36: mol_type = other DNA
aatatagcacacttcttaaactctacaagccccaac

SEQ ID NO: 24262 - DNA, 36 bp, synthetic construct; identical to SEQ ID NO: 24261
  misc_feature 1..36: note = Synthetic oligonucleotide
  source 1..36: mol_type = other DNA

SEQ ID NO: 24263 - DNA, 36 bp, synthetic construct
  misc_feature 1..36: note = Synthetic oligonucleotide
  source 1..36: mol_type = other DNA
aatatagcacacttttcaaactctacaagccccagc

SEQ ID NO: 24264 - DNA, 36 bp, synthetic construct; identical to SEQ ID NO: 24263
  misc_feature 1..36: note = Synthetic oligonucleotide
  source 1..36: mol_type = other DNA

SEQ ID NO: 24265 - DNA, 36 bp, synthetic construct; identical to SEQ ID NO: 24263
  misc_feature 1..36: note = Synthetic oligonucleotide
  source 1..36: mol_type = other DNA

SEQ ID NO: 24266 - DNA, 36 bp, synthetic construct; identical to SEQ ID NO: 24263
  misc_feature 1..36: note = Synthetic oligonucleotide
  source 1..36: mol_type = other DNA

SEQ ID NO: 24267 - DNA, 36 bp, synthetic construct; identical to SEQ ID NO: 24263
  misc_feature 1..36: note = Synthetic oligonucleotide
  source 1..36: mol_type = other DNA

SEQ ID NO: 24268 - DNA, 36 bp, synthetic construct
  misc_feature 1..36: note = Synthetic oligonucleotide
  source 1..36: mol_type = other DNA
aatatagcacatccttgaaaaccatcaaatcacaac

SEQ ID NO: 24269 - DNA, 36 bp, synthetic construct
  misc_feature 1..36: note = Synthetic oligonucleotide
  source 1..36: mol_type = other DNA
aatatagtcaattccttttttaaatcaaaccacaac

SEQ ID NO: 24270 - DNA, 36 bp, synthetic construct
  misc_feature 1..36: note = Synthetic oligonucleotide
  source 1..36: mol_type = other DNA
aatatagtcgatcgaataaactctacaagccccagc

SEQ ID NO: 24271 - DNA, 36 bp, synthetic construct
  misc_feature 1..36: note = Synthetic oligonucleotide
  source 1..36: mol_type = other DNA
aatatagtctccttttaaaactctacaagctccagc

SEQ ID NO: 24272 - DNA, 36 bp, synthetic construct; identical to SEQ ID NO: 10511
  misc_feature 1..36: note = Synthetic oligonucleotide
  source 1..36: mol_type = other DNA

SEQ ID NO: 24273 - DNA, 37 bp, synthetic construct
  misc_feature 1..37: note = Synthetic oligonucleotide
  source 1..37: mol_type = other DNA
aatatcagtaattcaaagattgaaagcaaatcacaac

SEQ ID NO: 24274 - DNA, 36 bp, synthetic construct; identical to SEQ ID NO: 10514
  misc_feature 1..36: note = Synthetic oligonucleotide
  source 1..36: mol_type = other DNA

SEQ ID NO: 24275 - DNA, 36 bp, synthetic construct
  misc_feature 1..36: note = Synthetic oligonucleotide
  source 1..36: mol_type = other DNA
aatatccttaatccttttttagcatcaaactacagc

SEQ ID NO: 24276 - DNA, 36 bp, synthetic construct
  misc_feature 1..36: note = Synthetic oligonucleotide
  source 1..36: mol_type = other DNA
aatatcgctatttctttctttcaatcaaaccacaac

SEQ ID NO: 24277 - DNA, 36 bp, synthetic construct
  misc_feature 1..36: note = Synthetic oligonucleotide
  source 1..36: mol_type = other DNA
aatatcgtaatctctaatctttaatcaaaccacaac

SEQ ID NO: 24278 - DNA, 36 bp, synthetic construct
  misc_feature 1..36: note = Synthetic oligonucleotide
  source 1..36: mol_type = other DNA
aatatcgtaatttctaatctttaatcaaaccacaac

SEQ ID NO: 24279 - DNA, 36 bp, synthetic construct; identical to SEQ ID NO: 10521
  misc_feature 1..36: note = Synthetic oligonucleotide
  source 1..36: mol_type = other DNA

SEQ ID NO: 24280 - DNA, 36 bp, synthetic construct; identical to SEQ ID NO: 10525
  misc_feature 1..36: note = Synthetic oligonucleotide
  source 1..36: mol_type = other DNA

SEQ ID NO: 24281 - DNA, 36 bp, synthetic construct; identical to SEQ ID NO: 10527
  misc_feature 1..36: note = Synthetic oligonucleotide
  source 1..36: mol_type = other DNA

SEQ ID NO: 24282 - DNA, 36 bp, synthetic construct; identical to SEQ ID NO: 10527
  misc_feature 1..36: note = Synthetic oligonucleotide
  source 1..36: mol_type = other DNA

SEQ ID NO: 24283 - DNA, 36 bp, synthetic construct; identical to SEQ ID NO: 10528
  misc_feature 1..36: note = Synthetic oligonucleotide
  source 1..36: mol_type = other DNA

SEQ ID NO: 24284 - DNA, 36 bp, synthetic construct; identical to SEQ ID NO: 10528
  misc_feature 1..36: note = Synthetic oligonucleotide
  source 1..36: mol_type = other DNA

SEQ ID NO: 24285 - DNA, 36 bp, synthetic construct; identical to SEQ ID NO: 10530
  misc_feature 1..36: note = Synthetic oligonucleotide
  source 1..36: mol_type = other DNA

SEQ ID NO: 24286 - DNA, 36 bp, synthetic construct; identical to SEQ ID NO: 10530
  misc_feature 1..36: note = Synthetic oligonucleotide
  source 1..36: mol_type = other DNA

SEQ ID NO: 24287 - DNA, 36 bp, synthetic construct; identical to SEQ ID NO: 10530
  misc_feature 1..36: note = Synthetic oligonucleotide
  source 1..36: mol_type = other DNA

SEQ ID NO: 24288 - DNA, 36 bp, synthetic construct; identical to SEQ ID NO: 10530
  misc_feature 1..36: note = Synthetic oligonucleotide
  source 1..36: mol_type = other DNA

SEQ ID NO: 24289 - DNA, 36 bp, synthetic construct; identical to SEQ ID NO: 10533
  misc_feature 1..36: note = Synthetic oligonucleotide
  source 1..36: mol_type = other DNA

SEQ ID NO: 24290 - DNA, 36 bp, synthetic construct; identical to SEQ ID NO: 10533
  misc_feature 1..36: note = Synthetic oligonucleotide
  source 1..36: mol_type = other DNA

SEQ ID NO: 24291 - DNA, 36 bp, synthetic construct; identical to SEQ ID NO: 10533
  misc_feature 1..36: note = Synthetic oligonucleotide
  source 1..36: mol_type = other DNA

SEQ ID NO: 24292 - DNA, 36 bp, synthetic construct
  misc_feature 1..36: note = Synthetic oligonucleotide
  source 1..36: mol_type = other DNA
aatatcgtgtcttctaatcttttatcaaaccacaac

SEQ ID NO: 24293 - DNA, 36 bp, synthetic construct; identical to SEQ ID NO: 10534
  misc_feature 1..36: note = Synthetic oligonucleotide
  source 1..36: mol_type = other DNA

SEQ ID NO: 24294 - DNA, 32 bp, synthetic construct
  misc_feature 1..32: note = Synthetic oligonucleotide
  source 1..32: mol_type = other DNA
aatatcgtgtttcctaatcttcaatcaaacca

SEQ ID NO: 24295 - DNA, 36 bp, synthetic construct; identical to SEQ ID NO: 10535
  misc_feature 1..36: note = Synthetic oligonucleotide
  source 1..36: mol_type = other DNA

SEQ ID NO: 24296 - DNA, 36 bp, synthetic construct
  misc_feature 1..36: note = Synthetic oligonucleotide
  source 1..36: mol_type = other DNA
aatatcgtgttttcaaatctttaatcaaaccacaac

SEQ ID NO: 24297 - DNA, 36 bp, synthetic construct; identical to SEQ ID NO: 24296
  misc_feature 1..36: note = Synthetic oligonucleotide
  source 1..36: mol_type = other DNA

SEQ ID NO: 24298 - DNA, 36 bp, synthetic construct
  misc_feature 1..36: note = Synthetic oligonucleotide
  source 1..36: mol_type = other DNA
aatatcgtgttttccaaactttaatcaaaccacaac

SEQ ID NO: 24299 - DNA, 36 bp, synthetic construct; identical to SEQ ID NO: 24298
  misc_feature 1..36: note = Synthetic oligonucleotide
  source 1..36: mol_type = other DNA

SEQ ID NO: 24300 - DNA, 36 bp, synthetic construct; identical to SEQ ID NO: 24298
  misc_feature 1..36: note = Synthetic oligonucleotide
  source 1..36: mol_type = other DNA

SEQ ID NO: 24301 - DNA, 36 bp, synthetic construct; identical to SEQ ID NO: 24298
  misc_feature 1..36: note = Synthetic oligonucleotide
  source 1..36: mol_type = other DNA

SEQ ID NO: 24302 - DNA, 36 bp, synthetic construct; identical to SEQ ID NO: 10539
  misc_feature 1..36: note = Synthetic oligonucleotide
  source 1..36: mol_type = other DNA

SEQ ID NO: 24303 - DNA, 36 bp, synthetic construct; identical to SEQ ID NO: 10539
  misc_feature 1..36: note = Synthetic oligonucleotide
  source 1..36: mol_type = other DNA

SEQ ID NO: 24304 - DNA, 36 bp, synthetic construct; identical to SEQ ID NO: 10539
  misc_feature 1..36: note = Synthetic oligonucleotide
  source 1..36: mol_type = other DNA

SEQ ID NO: 24305 - DNA, 36 bp, synthetic construct; identical to SEQ ID NO: 10539
  misc_feature 1..36: note = Synthetic oligonucleotide
  source 1..36: mol_type = other DNA

SEQ ID NO: 24306 - DNA, 36 bp, synthetic construct; identical to SEQ ID NO: 10539
  misc_feature 1..36: note = Synthetic oligonucleotide
  source 1..36: mol_type = other DNA

SEQ ID NO: 24307 - DNA, 36 bp, synthetic construct; identical to SEQ ID NO: 10539
  misc_feature 1..36: note = Synthetic oligonucleotide
  source 1..36: mol_type = other DNA

SEQ ID NO: 24308 - DNA, 36 bp, synthetic construct; identical to SEQ ID NO: 10539
  misc_feature 1..36: note = Synthetic oligonucleotide
  source 1..36: mol_type = other DNA

SEQ ID NO: 24309 - DNA, 36 bp, synthetic construct; identical to SEQ ID NO: 10539
  misc_feature 1..36: note = Synthetic oligonucleotide
  source 1..36: mol_type = other DNA

SEQ ID NO: 24310 - DNA, 36 bp, synthetic construct; identical to SEQ ID NO: 10539
  misc_feature 1..36: note = Synthetic oligonucleotide
  source 1..36: mol_type = other DNA

SEQ ID NO: 24311 - DNA, 36 bp, synthetic construct; identical to SEQ ID NO: 10539
  misc_feature 1..36: note = Synthetic oligonucleotide
  source 1..36: mol_type = other DNA

SEQ ID NO: 24312 - DNA, 36 bp, synthetic construct; identical to SEQ ID NO: 10539
  misc_feature 1..36: note = Synthetic oligonucleotide
  source 1..36: mol_type = other DNA

SEQ ID NO: 24313 - DNA, 36 bp, synthetic construct; identical to SEQ ID NO: 10539
  misc_feature 1..36: note = Synthetic oligonucleotide
  source 1..36: mol_type = other DNA

SEQ ID NO: 24314 - DNA, 36 bp, synthetic construct; identical to SEQ ID NO: 10539
  misc_feature 1..36: note = Synthetic oligonucleotide
  source 1..36: mol_type = other DNA

SEQ ID NO: 24315 - DNA, 36 bp, synthetic construct; identical to SEQ ID NO: 10539
  misc_feature 1..36: note = Synthetic oligonucleotide
  source 1..36: mol_type = other DNA

SEQ ID NO: 24316 - DNA, 36 bp, synthetic construct; identical to SEQ ID NO: 10539
  misc_feature 1..36: note = Synthetic oligonucleotide
  source 1..36: mol_type = other DNA

SEQ ID NO: 24317 - DNA, 36 bp, synthetic construct; identical to SEQ ID NO: 10539
  misc_feature 1..36: note = Synthetic oligonucleotide
  source 1..36: mol_type = other DNA

SEQ ID NO: 24318 - DNA, 36 bp, synthetic construct; identical to SEQ ID NO: 10539
  misc_feature 1..36: note = Synthetic oligonucleotide
  source 1..36: mol_type = other DNA

SEQ ID NO: 24319 - DNA, 36 bp, synthetic construct; identical to SEQ ID NO: 10539
  misc_feature 1..36: note = Synthetic oligonucleotide
  source 1..36: mol_type = other DNA

SEQ ID NO: 24320 - DNA, 36 bp, synthetic construct; identical to SEQ ID NO: 10539
  misc_feature 1..36: note = Synthetic oligonucleotide
  source 1..36: mol_type = other DNA

SEQ ID NO: 24321 - DNA, 36 bp, synthetic construct; identical to SEQ ID NO: 10539
  misc_feature 1..36: note = Synthetic oligonucleotide
  source 1..36: mol_type = other DNA

SEQ ID NO: 24322 - DNA, 36 bp, synthetic construct; identical to SEQ ID NO: 10539
  misc_feature 1..36: note = Synthetic oligonucleotide
  source 1..36: mol_type = other DNA

SEQ ID NO: 24323 - DNA, 36 bp, synthetic construct; identical to SEQ ID NO: 10539
  misc_feature 1..36: note = Synthetic oligonucleotide
  source 1..36: mol_type = other DNA

SEQ ID NO: 24324 - DNA, 36 bp, synthetic construct; identical to SEQ ID NO: 10539
  misc_feature 1..36: note = Synthetic oligonucleotide
  source 1..36: mol_type = other DNA

SEQ ID NO: 24325 - DNA, 36 bp, synthetic construct; identical to SEQ ID NO: 10539
  misc_feature 1..36: note = Synthetic oligonucleotide
  source 1..36: mol_type = other DNA

SEQ ID NO: 24326 - DNA, 36 bp, synthetic construct; identical to SEQ ID NO: 10539
  misc_feature 1..36: note = Synthetic oligonucleotide
  source 1..36: mol_type = other DNA

SEQ ID NO: 24327 - DNA, 36 bp, synthetic construct; identical to SEQ ID NO: 10539
  misc_feature 1..36: note = Synthetic oligonucleotide
  source 1..36: mol_type = other DNA

SEQ ID NO: 24328 - DNA, 36 bp, synthetic construct; identical to SEQ ID NO: 10539
  misc_feature 1..36: note = Synthetic oligonucleotide
  source 1..36: mol_type = other DNA

SEQ ID NO: 24329 - DNA, 36 bp, synthetic construct; identical to SEQ ID NO: 10539
  misc_feature 1..36: note = Synthetic oligonucleotide
  source 1..36: mol_type = other DNA

SEQ ID NO: 24330 - DNA, 36 bp, synthetic construct; identical to SEQ ID NO: 10539
  misc_feature 1..36: note = Synthetic oligonucleotide
  source 1..36: mol_type = other DNA

SEQ ID NO: 24331 - DNA, 36 bp, synthetic construct; identical to SEQ ID NO: 10539
  misc_feature 1..36: note = Synthetic oligonucleotide
  source 1..36: mol_type = other DNA

SEQ ID NO: 24332 - DNA, 36 bp, synthetic construct; identical to SEQ ID NO: 10539
  misc_feature 1..36: note = Synthetic oligonucleotide
  source 1..36: mol_type = other DNA

SEQ ID NO: 24333 - DNA, 36 bp, synthetic construct; identical to SEQ ID NO: 10539
  misc_feature 1..36: note = Synthetic oligonucleotide
  source 1..36: mol_type = other DNA

SEQ ID NO: 24334 - DNA, 36 bp, synthetic construct; identical to SEQ ID NO: 10539
  misc_feature 1..36: note = Synthetic oligonucleotide
  source 1..36: mol_type = other DNA

SEQ ID NO: 24335 - DNA, 36 bp, synthetic construct; identical to SEQ ID NO: 10539
  misc_feature 1..36: note = Synthetic oligonucleotide
  source 1..36: mol_type = other DNA

SEQ ID NO: 24336 - DNA, 36 bp, synthetic construct; identical to SEQ ID NO: 10539
  misc_feature 1..36: note = Synthetic oligonucleotide
  source 1..36: mol_type = other DNA

SEQ ID NO: 24337 - DNA, 36 bp, synthetic construct; identical to SEQ ID NO: 10539
  misc_feature 1..36: note = Synthetic oligonucleotide
  source 1..36: mol_type = other DNA

SEQ ID NO: 24338 - DNA, 36 bp, synthetic construct; identical to SEQ ID NO: 10539
  misc_feature 1..36: note = Synthetic oligonucleotide
  source 1..36: mol_type = other DNA

SEQ ID NO: 24339 - DNA, 36 bp, synthetic construct; identical to SEQ ID NO: 10539
  misc_feature 1..36: note = Synthetic oligonucleotide
  source 1..36: mol_type = other DNA

SEQ ID NO: 24340 - DNA, 36 bp, synthetic construct; identical to SEQ ID NO: 10539
  misc_feature 1..36: note = Synthetic oligonucleotide
  source 1..36: mol_type = other DNA

SEQ ID NO: 24341 - DNA, 36 bp, synthetic construct; identical to SEQ ID NO: 10539
  misc_feature 1..36: note = Synthetic oligonucleotide
  source 1..36: mol_type = other DNA

SEQ ID NO: 24342 - DNA, 36 bp, synthetic construct; identical to SEQ ID NO: 10539
  misc_feature 1..36: note = Synthetic oligonucleotide
  source 1..36: mol_type = other DNA

SEQ ID NO: 24343 - DNA, 36 bp, synthetic construct; identical to SEQ ID NO: 10539
  misc_feature 1..36: note = Synthetic oligonucleotide
  source 1..36: mol_type = other DNA

SEQ ID NO: 24344 - DNA, 36 bp, synthetic construct; identical to SEQ ID NO: 10539
  misc_feature 1..36: note = Synthetic oligonucleotide
  source 1..36: mol_type = other DNA

SEQ ID NO: 24345 - DNA, 36 bp, synthetic construct; identical to SEQ ID NO: 10539
  misc_feature 1..36: note = Synthetic oligonucleotide
  source 1..36: mol_type = other DNA

SEQ ID NO: 24346 - DNA, 37 bp, synthetic construct
  misc_feature 1..37: note = Synthetic oligonucleotide
  source 1..37: mol_type = other DNA
aatatcgtgttttctaatctttaatcaaaccacaact

SEQ ID NO: 24347 - DNA, 36 bp, synthetic construct
  misc_feature 1..36: note = Synthetic oligonucleotide
  source 1..36: mol_type = other DNA
aatatcgttaattccttttcgtcttcaaatcacaac

SEQ ID NO: 24348 - DNA, 36 bp, synthetic construct
  misc_feature 1..36: note = Synthetic oligonucleotide
  source 1..36: mol_type = other DNA
aatatcgttaattcctttttccaatcaaaccacaac

SEQ ID NO: 24349 - DNA, 36 bp, synthetic construct
  misc_feature 1..36: note = Synthetic oligonucleotide
  source 1..36: mol_type = other DNA
aatatcgttaattctaatctttaatcaaaccacaac

SEQ ID NO: 24350 - DNA, 36 bp, synthetic construct; identical to SEQ ID NO: 24349
  misc_feature 1..36: note = Synthetic oligonucleotide
  source 1..36: mol_type = other DNA

SEQ ID NO: 24351 - DNA, 36 bp, synthetic construct
  misc_feature 1..36: note = Synthetic oligonucleotide
  source 1..36: mol_type = other DNA
aatatcgttctttccaatctttaatcaaaccacaac

SEQ ID NO: 24352 - DNA, 36 bp, synthetic construct; identical to SEQ ID NO: 24351
  misc_feature 1..36: note = Synthetic oligonucleotide
  source 1..36: mol_type = other DNA

SEQ ID NO: 24353 - DNA, 36 bp, synthetic construct; identical to SEQ ID NO: 24351
  misc_feature 1..36: note = Synthetic oligonucleotide
  source 1..36: mol_type = other DNA

SEQ ID NO: 24354 - DNA, 36 bp, synthetic construct; identical to SEQ ID NO: 24351
  misc_feature 1..36: note = Synthetic oligonucleotide
  source 1..36: mol_type = other DNA

SEQ ID NO: 24355 - DNA, 32 bp, synthetic construct
  misc_feature 1..32: note = Synthetic oligonucleotide
  source 1..32: mol_type = other DNA
aatatcgttgtttccaatcttttatcaaacca

SEQ ID NO: 24356 - DNA, 36 bp, synthetic construct
  misc_feature 1..36: note = Synthetic oligonucleotide
  source 1..36: mol_type = other DNA
aatatcgttttctctaatctttaatcaaaccacaac

SEQ ID NO: 24357 - DNA, 36 bp, synthetic construct; identical to SEQ ID NO: 24356
  misc_feature 1..36: note = Synthetic oligonucleotide
  source 1..36: mol_type = other DNA

SEQ ID NO: 24358 - DNA, 36 bp, synthetic construct; identical to SEQ ID NO: 24356
  misc_feature 1..36: note = Synthetic oligonucleotide
  source 1..36: mol_type = other DNA

SEQ ID NO: 24359 - DNA, 36 bp, synthetic construct; identical to SEQ ID NO: 24356
  misc_feature 1..36: note = Synthetic oligonucleotide
  source 1..36: mol_type = other DNA

SEQ ID NO: 24360 - DNA, 36 bp, synthetic construct; identical to SEQ ID NO: 24356
  misc_feature 1..36: note = Synthetic oligonucleotide
  source 1..36: mol_type = other DNA

SEQ ID NO: 24361 - DNA, 36 bp, synthetic construct; identical to SEQ ID NO: 24356
  misc_feature 1..36: note = Synthetic oligonucleotide
  source 1..36: mol_type = other DNA

SEQ ID NO: 24362 - DNA, 36 bp, synthetic construct; identical to SEQ ID NO: 24356
  misc_feature 1..36: note = Synthetic oligonucleotide
  source 1..36: mol_type = other DNA

SEQ ID NO: 24363 - DNA, 36 bp, synthetic construct; identical to SEQ ID NO: 24356
  misc_feature 1..36: note = Synthetic oligonucleotide
  source 1..36: mol_type = other DNA

SEQ ID NO: 24364 - DNA, 36 bp, synthetic construct; identical to SEQ ID NO: 24356
  misc_feature 1..36: note = Synthetic oligonucleotide
  source 1..36: mol_type = other DNA

SEQ ID NO: 24365 - DNA, 28 bp, synthetic construct
  misc_feature 1..28: note = Synthetic oligonucleotide
  source 1..28: mol_type = other DNA
aatatcgttttttctaatctttaatcaa

SEQ ID NO: 24366 - DNA, 36 bp, synthetic construct; identical to SEQ ID NO: 10545
  misc_feature 1..36: note = Synthetic oligonucleotide
  source 1..36: mol_type = other DNA

SEQ ID NO: 24367 - DNA, 36 bp, synthetic construct; identical to SEQ ID NO: 10545
  misc_feature 1..36: note = Synthetic oligonucleotide
  source 1..36: mol_type = other DNA

SEQ ID NO: 24368 - DNA, 36 bp, synthetic construct; identical to SEQ ID NO: 10545
  misc_feature 1..36: note = Synthetic oligonucleotide
  source 1..36: mol_type = other DNA

SEQ ID NO: 24369 - DNA, 36 bp, synthetic construct; identical to SEQ ID NO: 10545
  misc_feature 1..36: note = Synthetic oligonucleotide
  source 1..36: mol_type = other DNA

SEQ ID NO: 24370 - DNA, 36 bp, synthetic construct; identical to SEQ ID NO: 10545
  misc_feature 1..36: note = Synthetic oligonucleotide
  source 1..36: mol_type = other DNA

SEQ ID NO: 24371 - DNA, 36 bp, synthetic construct; identical to SEQ ID NO: 10545
  misc_feature 1..36: note = Synthetic oligonucleotide
  source 1..36: mol_type = other DNA

SEQ ID NO: 24372 - DNA, 36 bp, synthetic construct; identical to SEQ ID NO: 10545
  misc_feature 1..36: note = Synthetic oligonucleotide
  source 1..36: mol_type = other DNA

SEQ ID NO: 24373 - DNA, 36 bp, synthetic construct; identical to SEQ ID NO: 10545
  misc_feature 1..36: note = Synthetic oligonucleotide
  source 1..36: mol_type = other DNA

SEQ ID NO: 24374 - DNA, 36 bp, synthetic construct; identical to SEQ ID NO: 10545
  misc_feature 1..36: note = Synthetic oligonucleotide
  source 1..36: mol_type = other DNA

SEQ ID NO: 24375 - DNA, 37 bp, synthetic construct
  misc_feature 1..37: note = Synthetic oligonucleotide
  source 1..37: mol_type = other DNA
aatatcgttttttctaatctttaatcaaaccacaaca

SEQ ID NO: 24376 - DNA, 37 bp, synthetic construct
  misc_feature 1..37: note = Synthetic oligonucleotide
  source 1..37: mol_type = other DNA
aatatcgttttttctaatctttaatcaaaccacaact

SEQ ID NO: 24377 - DNA, 36 bp, synthetic construct
  misc_feature 1..36: note = Synthetic oligonucleotide
  source 1..36: mol_type = other DNA
aatatctataaatcatcttttaaatcaaaccacaac

SEQ ID NO: 24378 - DNA, 31 bp, synthetic construct
  misc_feature 1..31: note = Synthetic oligonucleotide
  source 1..31: mol_type = other DNA
aatcaacctgatctctctgcttgcgctgcag

SEQ ID NO: 24379 - DNA, 37 bp, synthetic construct
  misc_feature 1..37: note = Synthetic oligonucleotide
  source 1..37: mol_type = other DNA
aatcacaaaactacaaaatttggaagcaattcacaac

SEQ ID NO: 24380 - DNA, 37 bp, synthetic construct
  misc_feature 1..37: note = Synthetic oligonucleotide
  source 1..37: mol_type = other DNA
aatcacaaagatacaaattttgaaagtaattcacaac

SEQ ID NO: 24381 - DNA, 36 bp, synthetic construct; identical to SEQ ID NO: 10549
  misc_feature 1..36: note = Synthetic oligonucleotide
  source 1..36: mol_type = other DNA

SEQ ID NO: 24382 - DNA, 36 bp, synthetic construct
  misc_feature 1..36: note = Synthetic oligonucleotide
  source 1..36: mol_type = other DNA
aatctaattcatcttgataagagatcaaatcccaac

SEQ ID NO: 24383 - DNA, 27 bp, synthetic construct
  misc_feature 1..27: note = Synthetic oligonucleotide
  source 1..27: mol_type = other DNA
aatctacaatagtagaaattatatagg

SEQ ID NO: 24384 - DNA, 36 bp, synthetic construct
  misc_feature 1..36: note = Synthetic oligonucleotide
  source 1..36: mol_type = other DNA
aatctcttgaatcttgctacgaaatcaaactacaac

SEQ ID NO: 24385 - DNA, 36 bp, synthetic construct
  misc_feature 1..36: note = Synthetic oligonucleotide
  source 1..36: mol_type = other DNA
aatgtaaaaaacctttgtttgaaatcaaatcacaac

SEQ ID NO: 24386 - DNA, 36 bp, synthetic construct
  misc_feature 1..36: note = Synthetic oligonucleotide
  source 1..36: mol_type = other DNA
aatgtaacaaactcagatttgaagtcaatccacaac

SEQ ID NO: 24387 - DNA, 36 bp, synthetic construct
  misc_feature 1..36: note = Synthetic oligonucleotide
  source 1..36: mol_type = other DNA
aatgtaacaaattcagatttgcagtcaatccacaac

SEQ ID NO: 24388 - DNA, 36 bp, synthetic construct
  misc_feature 1..36: note = Synthetic oligonucleotide
  source 1..36: mol_type = other DNA
aatgtaaccaatcccgccctgctagcaatccgcaac

SEQ ID NO: 24389 - DNA, 36 bp, synthetic construct
  misc_feature 1..36: note = Synthetic oligonucleotide
  source 1..36: mol_type = other DNA
aatgtacttaagcggcggttcctgtcaagtcccagc

SEQ ID NO: 24390 - DNA, 36 bp, synthetic construct
  misc_feature 1..36: note = Synthetic oligonucleotide
  source 1..36: mol_type = other DNA
aatgtacttgagcggccgttgttgtcaagccccagc

SEQ ID NO: 24391 - DNA, 36 bp, synthetic construct
  misc_feature 1..36: note = Synthetic oligonucleotide
  source 1..36: mol_type = other DNA
aatgtacttgagcggcggttcttgtcaagctccagc

SEQ ID NO: 24392 - DNA, 36 bp, synthetic construct
  misc_feature 1..36: note = Synthetic oligonucleotide
  source 1..36: mol_type = other DNA
aatgtagaaatcaaagaacgaaagtcaatccgcaac

SEQ ID NO: 24393 - DNA, 36 bp, synthetic construct
  misc_feature 1..36: note = Synthetic oligonucleotide
  source 1..36: mol_type = other DNA
aatgtcttctattccaatttcttatcaaaccacaac

SEQ ID NO: 24394 - DNA, 26 bp, synthetic construct
  misc_feature 1..26: note = Synthetic oligonucleotide
  source 1..26: mol_type = other DNA
aatgtgtatgctatgtttagatacaa

SEQ ID NO: 24395 - DNA, 19 bp, synthetic construct
  misc_feature 1..19: note = Synthetic oligonucleotide
  source 1..19: mol_type = other DNA
aattacactactctcaaac

SEQ ID NO: 24396 - DNA, 37 bp, synthetic construct
  misc_feature 1..37: note = Synthetic oligonucleotide
  source 1..37: mol_type = other DNA
aattataccataccaagaactaccagggaactacaac

SEQ ID NO: 24397 - DNA, 37 bp, synthetic construct
  misc_feature 1..37: note = Synthetic oligonucleotide
  source 1..37: mol_type = other DNA
aattataccttagcgagagatagtagggaattacaac

SEQ ID NO: 24398 - DNA, 37 bp, synthetic construct
  misc_feature 1..37: note = Synthetic oligonucleotide
  source 1..37: mol_type = other DNA
aattatagcatatcgggaaatcacagggaataaaaac

SEQ ID NO: 24399 - DNA, 37 bp, synthetic construct
  misc_feature 1..37: note = Synthetic oligonucleotide
  source 1..37: mol_type = other DNA
aattatagcatatggagaatttactaggaactataac

SEQ ID NO: 24400 - DNA, 20 bp, synthetic construct
  misc_feature 1..20: note = Synthetic oligonucleotide
  source 1..20: mol_type = other DNA
aattcaaaaagatacaaaac

SEQ ID NO: 24401 - DNA, 36 bp, synthetic construct; identical to SEQ ID NO: 10580
  misc_feature 1..36: note = Synthetic oligonucleotide
  source 1..36: mol_type = other DNA

SEQ ID NO: 24402 - DNA, 31 bp, synthetic construct
  misc_feature 1..31: note = Synthetic oligonucleotide
  source 1..31: mol_type = other DNA
aattccgatctttgacttattgatatacacc

SEQ ID NO: 24403 - DNA, 31 bp, synthetic construct
  misc_feature 1..31: note = Synthetic oligonucleotide
  source 1..31: mol_type = other DNA
aattgctttcaaattttgtagttttgtgatt

SEQ ID NO: 24404 - DNA, 31 bp, synthetic construct; identical to SEQ ID NO: 24403
  misc_feature 1..31: note = Synthetic oligonucleotide
  source 1..31: mol_type = other DNA

SEQ ID NO: 24405 - DNA, 37 bp, synthetic construct
  misc_feature 1..37: note = Synthetic oligonucleotide
  source 1..37: mol_type = other DNA
aattgtagcgaaacgagagacggccgcaatccgcagc

SEQ ID NO: 24406 - DNA, 37 bp, synthetic construct
  misc_feature 1..37: note = Synthetic oligonucleotide
  source 1..37: mol_type = other DNA
aattgtatcagatgttccgctggtgaggtatcggaac

SEQ ID NO: 24407 - DNA, 37 bp, synthetic construct; identical to SEQ ID NO: 24406
  misc_feature 1..37: note = Synthetic oligonucleotide
  source 1..37: mol_type = other DNA

SEQ ID NO: 24408 - DNA, 36 bp, synthetic construct
  misc_feature 1..36: note = Synthetic oligonucleotide
  source 1..36: mol_type = other DNA
aatttaaaaaagaacaatttgttgtaaagtcaaaac

SEQ ID NO: 24409 - DNA, 37 bp, synthetic construct
  misc_feature 1..37: note = Synthetic oligonucleotide
  source 1..37: mol_type = other DNA
aatttaagtaacccagttctgtccacaaatcacaacg

SEQ ID NO: 24410 - DNA, 31 bp, synthetic construct
  misc_feature 1..31: note = Synthetic oligonucleotide
  source 1..31: mol_type = other DNA
aatttcaattccttgatggtacgattaaaag

SEQ ID NO: 24411 - DNA, 36 bp, synthetic construct
  misc_feature 1..36: note = Synthetic oligonucleotide
  source 1..36: mol_type = other DNA
aattttaaagggggggaatctcggttcaaccgcaac

SEQ ID NO: 24412 - DNA, 37 bp, synthetic construct
  misc_feature 1..37: note = Synthetic oligonucleotide
  source 1..37: mol_type = other DNA
aattttagtacctaaacaaattacgtgactgtaaaac

SEQ ID NO: 24413 - DNA, 33 bp, synthetic construct
  misc_feature 1..33: note = Synthetic oligonucleotide
  source 1..33: mol_type = other DNA
acaaaactacgaaatttgaaagcaattcacaac

SEQ ID NO: 24414 - DNA, 36 bp, synthetic construct; identical to SEQ ID NO: 10589
  misc_feature 1..36: note = Synthetic oligonucleotide
  source 1..36: mol_type = other DNA

SEQ ID NO: 24415 - DNA, 33 bp, synthetic construct
  misc_feature 1..33: note = Synthetic oligonucleotide
  source 1..33: mol_type = other DNA
acagcttgacaccaaaatgtagttttcaaagat

SEQ ID NO: 24416 - DNA, 31 bp, synthetic construct
  misc_feature 1..31: note = Synthetic oligonucleotide
  source 1..31: mol_type = other DNA
acagttacttaaatcttgagagtacaaaaac

SEQ ID NO: 24417 - DNA, 31 bp, synthetic construct
  misc_feature 1..31: note = Synthetic oligonucleotide
  source 1..31: mol_type = other DNA
acatcaattcctataaaggataaattaacac

SEQ ID NO: 24418 - DNA, 30 bp, synthetic construct
  misc_feature 1..30: note = Synthetic oligonucleotide
  source 1..30: mol_type = other DNA
acattttttgtattaacaatcccctcaaac

SEQ ID NO: 24419 - DNA, 35 bp, synthetic construct
  misc_feature 1..35: note = Synthetic oligonucleotide
  source 1..35: mol_type = other DNA
accaaagatactaattactgaaagcaattcacaac

SEQ ID NO: 24420 - DNA, 36 bp, synthetic construct
  misc_feature 1..36: note = Synthetic oligonucleotide
  source 1..36: mol_type = other DNA
accatagcacagcgatgcaaaaagggaagctatggc

SEQ ID NO: 24421 - DNA, 36 bp, synthetic construct; identical to SEQ ID NO: 10593
  misc_feature 1..36: note = Synthetic oligonucleotide
  source 1..36: mol_type = other DNA

SEQ ID NO: 24422 - DNA, 36 bp, synthetic construct
  misc_feature 1..36: note = Synthetic oligonucleotide
  source 1..36: mol_type = other DNA
accatagccgctcagagatcgcggtccagcggcaac

SEQ ID NO: 24423 - DNA, 36 bp, synthetic construct
  misc_feature 1..36: note = Synthetic oligonucleotide
  source 1..36: mol_type = other DNA
acgaaaatttaaagctttttggtgtcaagctgaaac

SEQ ID NO: 24424 - DNA, 36 bp, synthetic construct
  misc_feature 1..36: note = Synthetic oligonucleotide
  source 1..36: mol_type = other DNA
acggtagcagttcaggaattgcaggccaaccgcagc

SEQ ID NO: 24425 - DNA, 34 bp, synthetic construct
  misc_feature 1..34: note = Synthetic oligonucleotide
  source 1..34: mol_type = other DNA
acgtaaaaatacaaatctgaaagcaattcacaac

SEQ ID NO: 24426 - DNA, 34 bp, synthetic construct; identical to SEQ ID NO: 24425
  misc_feature 1..34: note = Synthetic oligonucleotide
  source 1..34: mol_type = other DNA

SEQ ID NO: 24427 - DNA, 34 bp, synthetic construct; identical to SEQ ID NO: 24425
  misc_feature 1..34: note = Synthetic oligonucleotide
  source 1..34: mol_type = other DNA

SEQ ID NO: 24428 - DNA, 34 bp, synthetic construct; identical to SEQ ID NO: 24425
  misc_feature 1..34: note = Synthetic oligonucleotide
  source 1..34: mol_type = other DNA

SEQ ID NO: 24429 - DNA, 36 bp, synthetic construct
  misc_feature 1..36: note = Synthetic oligonucleotide
  source 1..36: mol_type = other DNA
acgttgccgccgccgggattggaatcaaggcaaagc

SEQ ID NO: 24430 - DNA, 38 bp, synthetic construct
  misc_feature 1..38: note = Synthetic oligonucleotide
  source 1..38: mol_type = other DNA
acgtttgagagtagtgtaaatttatagggtagtaaaac

SEQ ID NO: 24431 - DNA, 36 bp, synthetic construct; identical to SEQ ID NO: 10601
  misc_feature 1..36: note = Synthetic oligonucleotide
  source 1..36: mol_type = other DNA

SEQ ID NO: 24432 - DNA, 31 bp, synthetic construct
  misc_feature 1..31: note = Synthetic oligonucleotide
  source 1..31: mol_type = other DNA
actaccatctaggataacactactctcaaac

SEQ ID NO: 24433 - DNA, 31 bp, synthetic construct
  misc_feature 1..31: note = Synthetic oligonucleotide
  source 1..31: mol_type = other DNA
actaccttataaatttacactactctcaaac

SEQ ID NO: 24434 - DNA, 36 bp, synthetic construct
  misc_feature 1..36: note = Synthetic oligonucleotide
  source 1..36: mol_type = other DNA
actatagcatataggaaattctagtcaagtcgcaac

SEQ ID NO: 24435 - DNA, 36 bp, synthetic construct; identical to SEQ ID NO: 10603
  misc_feature 1..36: note = Synthetic oligonucleotide
  source 1..36: mol_type = other DNA

SEQ ID NO: 24436 - DNA, 36 bp, synthetic construct
  misc_feature 1..36: note = Synthetic oligonucleotide
  source 1..36: mol_type = other DNA
actcaagtaaatcaggttttggcgtcaagctgtaac

SEQ ID NO: 24437 - DNA, 25 bp, synthetic construct
  misc_feature 1..25: note = Synthetic oligonucleotide
  source 1..25: mol_type = other DNA
actctaataatccctgatatacttg

SEQ ID NO: 24438 - DNA, 25 bp, synthetic construct
  misc_feature 1..25: note = Synthetic oligonucleotide
  source 1..25: mol_type = other DNA
actctaataatccctgatatacttg

SEQ ID NO: 24439 - DNA, 25 bp, synthetic construct
  misc_feature 1..25: note = Synthetic oligonucleotide
  source 1..25: mol_type = other DNA
actctaataatccctgatatacttg

SEQ ID NO: 24440 - DNA, 25 bp, synthetic construct
  misc_feature 1..25: note = Synthetic oligonucleotide
  source 1..25: mol_type = other DNA
actctaataatccctgatatacttg

SEQ ID NO: 24441 - DNA, 36 bp, synthetic construct
  misc_feature 1..36: note = Synthetic oligonucleotide
  source 1..36: mol_type = other DNA
actgaaagacattgtcaaagagcatcaaatcacaac

SEQ ID NO: 24442 - DNA, 36 bp, synthetic construct; identical to SEQ ID NO: 24441
  misc_feature 1..36: note = Synthetic oligonucleotide
  source 1..36: mol_type = other DNA

SEQ ID NO: 24443 - DNA, 36 bp, synthetic construct
  misc_feature 1..36: note = Synthetic oligonucleotide
  source 1..36: mol_type = other DNA
actgcggactgcggctcttcctctctgtgctaccct

SEQ ID NO: 24444 - DNA, 36 bp, synthetic construct; identical to SEQ ID NO: 24443
  misc_feature 1..36: note = Synthetic oligonucleotide
  source 1..36: mol_type = other DNA

SEQ ID NO: 24445 - DNA, 36 bp, synthetic construct; identical to SEQ ID NO: 24443
  misc_feature 1..36: note = Synthetic oligonucleotide
  source 1..36: mol_type = other DNA

SEQ ID NO: 24446 - DNA, 36 bp, synthetic construct; identical to SEQ ID NO: 24443
  misc_feature 1..36: note = Synthetic oligonucleotide
  source 1..36: mol_type = other DNA

SEQ ID NO: 24447 - DNA, 36 bp, synthetic construct
  misc_feature 1..36: note = Synthetic oligonucleotide
  source 1..36: mol_type = other DNA
actgggaatcaatcaccaatcccctttgatacactt

SEQ ID NO: 24448 - DNA, 36 bp, synthetic construct
  misc_feature 1..36: note = Synthetic oligonucleotide
  source 1..36: mol_type = other DNA
actgggaatcaatcactaatcccctttgatatactg

SEQ ID NO: 24449 - DNA, 36 bp, synthetic construct
  misc_feature 1..36: note = Synthetic oligonucleotide
  source 1..36: mol_type = other DNA
actgggaattagcttctacccttcttgataaacttg

SEQ ID NO: 24450 - DNA, 36 bp, synthetic construct; identical to SEQ ID NO: 24449
  misc_feature 1..36: note = Synthetic oligonucleotide
  source 1..36: mol_type = other DNA

SEQ ID NO: 24451 - DNA, 36 bp, synthetic construct
  misc_feature 1..36: note = Synthetic oligonucleotide
  source 1..36: mol_type = other DNA
actgggaattagcttctacccttcttggtaaacttg

SEQ ID NO: 24452 - DNA, 36 bp, synthetic construct; identical to SEQ ID NO: 24451
  misc_feature 1..36: note = Synthetic oligonucleotide
  source 1..36: mol_type = other DNA

SEQ ID NO: 24453 - DNA, 36 bp, synthetic construct
  misc_feature 1..36: note = Synthetic oligonucleotide
  source 1..36: mol_type = other DNA
actggggcttgtaggtttttcgatctttgatacagt

SEQ ID NO: 24454 - DNA, 36 bp, synthetic construct
  misc_feature 1..36: note = Synthetic oligonucleotide
  source 1..36: mol_type = other DNA
actggggttcagttctcattacccctgatagacttc

SEQ ID NO: 24455 - DNA, 36 bp, synthetic construct; identical to SEQ ID NO: 24454
  misc_feature 1..36: note = Synthetic oligonucleotide
  source 1..36: mol_type = other DNA

SEQ ID NO: 24456 - DNA, 36 bp, synthetic construct; identical to SEQ ID NO: 24454
  misc_feature 1..36: note = Synthetic oligonucleotide
  source 1..36: mol_type = other DNA

SEQ ID NO: 24457 - DNA, 36 bp, synthetic construct; identical to SEQ ID NO: 10631
  misc_feature 1..36: note = Synthetic oligonucleotide
  source 1..36: mol_type = other DNA

SEQ ID NO: 24458 - DNA, 36 bp, synthetic construct; identical to SEQ ID NO: 10631
  misc_feature 1..36: note = Synthetic oligonucleotide
  source 1..36: mol_type = other DNA

SEQ ID NO: 24459 - DNA, 36 bp, synthetic construct
  misc_feature 1..36: note = Synthetic oligonucleotide
  source 1..36: mol_type = other DNA
actgtagcaaatcgagaagcggtcgcaatccgcagc

SEQ ID NO: 24460 - DNA, 36 bp, synthetic construct; identical to SEQ ID NO: 24459
  misc_feature 1..36: note = Synthetic oligonucleotide
  source 1..36: mol_type = other DNA

SEQ ID NO: 24461 - DNA, 36 bp, synthetic construct
  misc_feature 1..36: note = Synthetic oligonucleotide
  source 1..36: mol_type = other DNA
actgtagcccatttcaaaagaacatcaaatcacaac

SEQ ID NO: 24462 - DNA, 36 bp, synthetic construct
  misc_feature 1..36: note = Synthetic oligonucleotide
  source 1..36: mol_type = other DNA
actgtagctccctttctcatttcgcagtgctacaat

SEQ ID NO: 24463 - DNA, 36 bp, synthetic construct; identical to SEQ ID NO: 10637
  misc_feature 1..36: note = Synthetic oligonucleotide
  source 1..36: mol_type = other DNA

SEQ ID NO: 24464 - DNA, 36 bp, synthetic construct; identical to SEQ ID NO: 10637
  misc_feature 1..36: note = Synthetic oligonucleotide
  source 1..36: mol_type = other DNA

SEQ ID NO: 24465 - DNA, 36 bp, synthetic construct; identical to SEQ ID NO: 10639
  misc_feature 1..36: note = Synthetic oligonucleotide
  source 1..36: mol_type = other DNA

SEQ ID NO: 24466 - DNA, 36 bp, synthetic construct
  misc_feature 1..36: note = Synthetic oligonucleotide
  source 1..36: mol_type = other DNA
actgtatcagactccgccggggggtgaagtcagaac

SEQ ID NO: 24467 - DNA, 35 bp, synthetic construct
  misc_feature 1..35: note = Synthetic oligonucleotide
  source 1..35: mol_type = other DNA
actgtatttgcacaagcaaagttactaaatttaaa

SEQ ID NO: 24468 - DNA, 36 bp, synthetic construct
  misc_feature 1..36: note = Synthetic oligonucleotide
  source 1..36: mol_type = other DNA
actgtatttgcataagcaaagttactaaatttaaag

SEQ ID NO: 24469 - DNA, 36 bp, synthetic construct
  misc_feature 1..36: note = Synthetic oligonucleotide
  source 1..36: mol_type = other DNA
actgtcttatatcctgtatttcaacatcaaaccaca

SEQ ID NO: 24470 - DNA, 36 bp, synthetic construct
  misc_feature 1..36: note = Synthetic oligonucleotide
  source 1..36: mol_type = other DNA
actgtcttatatcctgtatttctacatcaaaccaca

SEQ ID NO: 24471 - DNA, 37 bp, synthetic construct
  misc_feature 1..37: note = Synthetic oligonucleotide
  source 1..37: mol_type = other DNA
actgtgaatgcggtaataaagttacaattttgaaagc

SEQ ID NO: 24472 - DNA, 37 bp, synthetic construct
  misc_feature 1..37: note = Synthetic oligonucleotide
  source 1..37: mol_type = other DNA
actgtgaattatcctctaaagataatgcctgaaagca

SEQ ID NO: 24473 - DNA, 36 bp, synthetic construct
  misc_feature 1..36: note = Synthetic oligonucleotide
  source 1..36: mol_type = other DNA
actgtgtaaatctacaatttgaaagcaattcacaac

SEQ ID NO: 24474 - DNA, 36 bp, synthetic construct
  misc_feature 1..36: note = Synthetic oligonucleotide
  source 1..36: mol_type = other DNA
actgtgtcagacctcgctgaggggtgaagtcaaaac

SEQ ID NO: 24475 - DNA, 31 bp, synthetic construct
  misc_feature 1..31: note = Synthetic oligonucleotide
  source 1..31: mol_type = other DNA
actgttaaagagctaagctacaacaaatttg

SEQ ID NO: 24476 - DNA, 36 bp, synthetic construct; identical to SEQ ID NO: 10657
  misc_feature 1..36: note = Synthetic oligonucleotide
  source 1..36: mol_type = other DNA

SEQ ID NO: 24477 - DNA, 36 bp, synthetic construct
  misc_feature 1..36: note = Synthetic oligonucleotide
  source 1..36: mol_type = other DNA
actgttcgggtgctttgtttcccgggcggctacaac

SEQ ID NO: 24478 - DNA, 33 bp, synthetic construct
  misc_feature 1..33: note = Synthetic oligonucleotide
  source 1..33: mol_type = other DNA
actgtttccaatggttcaaagatactaaaatga

SEQ ID NO: 24479 - DNA, 34 bp, synthetic construct
  misc_feature 1..34: note = Synthetic oligonucleotide
  source 1..34: mol_type = other DNA
actgtttccaatggttcaaagatactaaaatgaa

SEQ ID NO: 24480 - DNA, 35 bp, synthetic construct
  misc_feature 1..35: note = Synthetic oligonucleotide
  source 1..35: mol_type = other DNA
actgtttccaatggttcaaagatactaaaatgaaa

SEQ ID NO: 24481 - DNA, 35 bp, synthetic construct; identical to SEQ ID NO: 24480
  misc_feature 1..35: note = Synthetic oligonucleotide
  source 1..35: mol_type = other DNA

SEQ ID NO: 24482 - DNA, 35 bp, synthetic construct; identical to SEQ ID NO: 24480
  misc_feature 1..35: note = Synthetic oligonucleotide
  source 1..35: mol_type = other DNA

SEQ ID NO: 24483 - DNA, 31 bp, synthetic construct
  misc_feature 1..31: note = Synthetic oligonucleotide
  source 1..31: mol_type = other DNA
actgtttccaatggttcaaagatacttaaat

SEQ ID NO: 24484 - DNA, 36 bp, synthetic construct
  misc_feature 1..36: note = Synthetic oligonucleotide
  source 1..36: mol_type = other DNA
actgtttccgattctcaaagaacatcaaatcacaac

SEQ ID NO: 24485 - DNA, 35 bp, synthetic construct
  misc_feature 1..35: note = Synthetic oligonucleotide
  source 1..35: mol_type = other DNA
actgtttcctatggttcaaagatactaaaatgaaa

SEQ ID NO: 24486 - DNA, 35 bp, synthetic construct; identical to SEQ ID NO: 24485
  misc_feature 1..35: note = Synthetic oligonucleotide
  source 1..35: mol_type = other DNA

SEQ ID NO: 24487 - DNA, 35 bp, synthetic construct; identical to SEQ ID NO: 24485
  misc_feature 1..35: note = Synthetic oligonucleotide
  source 1..35: mol_type = other DNA

SEQ ID NO: 24488 - DNA, 35 bp, synthetic construct; identical to SEQ ID NO: 24485
  misc_feature 1..35: note = Synthetic oligonucleotide
  source 1..35: mol_type = other DNA

SEQ ID NO: 24489 - DNA, 35 bp, synthetic construct; identical to SEQ ID NO: 24485
  misc_feature 1..35: note = Synthetic oligonucleotide
  source 1..35: mol_type = other DNA

SEQ ID NO: 24490 - DNA, 35 bp, synthetic construct; identical to SEQ ID NO: 24485
  misc_feature 1..35: note = Synthetic oligonucleotide
  source 1..35: mol_type = other DNA

SEQ ID NO: 24491 - DNA, 35 bp, synthetic construct; identical to SEQ ID NO: 24485
  misc_feature 1..35: note = Synthetic oligonucleotide
  source 1..35: mol_type = other DNA

SEQ ID NO: 24492 - DNA, 35 bp, synthetic construct; identical to SEQ ID NO: 24485
  misc_feature 1..35: note = Synthetic oligonucleotide
  source 1..35: mol_type = other DNA

SEQ ID NO: 24493 - DNA, 36 bp, synthetic construct
  misc_feature 1..36: note = Synthetic oligonucleotide
  source 1..36: mol_type = other DNA
actgtttctcatctcaaatttgcatcaaatcacaac

SEQ ID NO: 24494 - DNA, 35 bp, synthetic construct
  misc_feature 1..35: note = Synthetic oligonucleotide
  source 1..35: mol_type = other DNA
actgttttctatggttcaaagatactaaaatgaaa

SEQ ID NO: 24495 - DNA, 35 bp, synthetic construct; identical to SEQ ID NO: 24494
  misc_feature 1..35: note = Synthetic oligonucleotide
  source 1..35: mol_type = other DNA

SEQ ID NO: 24496 - DNA, 35 bp, synthetic construct; identical to SEQ ID NO: 24494
  misc_feature 1..35: note = Synthetic oligonucleotide
  source 1..35: mol_type = other DNA

SEQ ID NO: 24497 - DNA, 35 bp, synthetic construct; identical to SEQ ID NO: 24494
  misc_feature 1..35: note = Synthetic oligonucleotide
  source 1..35: mol_type = other DNA

SEQ ID NO: 24498 - DNA, 35 bp, synthetic construct; identical to SEQ ID NO: 24494
  misc_feature 1..35: note = Synthetic oligonucleotide
  source 1..35: mol_type = other DNA

SEQ ID NO: 24499 - DNA, 36 bp, synthetic construct
  misc_feature 1..36: note = Synthetic oligonucleotide
  source 1..36: mol_type = other DNA
acttaaattatatattatttgtttacttgttacaac

SEQ ID NO: 24500 - DNA, 22 bp, synthetic construct
  misc_feature 1..22: note = Synthetic oligonucleotide
  source 1..22: mol_type = other DNA
acttgtctacgaggattgcaac

SEQ ID NO: 24501 - DNA, 36 bp, synthetic construct
  misc_feature 1..36: note = Synthetic oligonucleotide
  source 1..36: mol_type = other DNA
actttaaaatatccttatatggtgtcaagctgaaac

SEQ ID NO: 24502 - DNA, 37 bp, synthetic construct; identical to SEQ ID NO: 10677
  misc_feature 1..37: note = Synthetic oligonucleotide
  source 1..37: mol_type = other DNA

SEQ ID NO: 24503 - DNA, 36 bp, synthetic construct; identical to SEQ ID NO: 10678
  misc_feature 1..36: note = Synthetic oligonucleotide
  source 1..36: mol_type = other DNA

SEQ ID NO: 24504 - DNA, 36 bp, synthetic construct
  misc_feature 1..36: note = Synthetic oligonucleotide
  source 1..36: mol_type = other DNA
actttagccggttagggaatggtcggctgccaaaac

SEQ ID NO: 24505 - DNA, 37 bp, synthetic construct
  misc_feature 1..37: note = Synthetic oligonucleotide
  source 1..37: mol_type = other DNA
agaaatatcagtctggaaaatggagtcaagctgcaac

SEQ ID NO: 24506 - DNA, 36 bp, synthetic construct
  misc_feature 1..36: note = Synthetic oligonucleotide
  source 1..36: mol_type = other DNA
agaatacactgccaaggtttggaatcaaggcaaagc

SEQ ID NO: 24507 - DNA, 36 bp, synthetic construct; identical to SEQ ID NO: 24506
  misc_feature 1..36: note = Synthetic oligonucleotide
  source 1..36: mol_type = other DNA

SEQ ID NO: 24508 - DNA, 36 bp, synthetic construct
  misc_feature 1..36: note = Synthetic oligonucleotide
  source 1..36: mol_type = other DNA
agaatagcgattggggaatcggaggccaactgcaac

SEQ ID NO: 24509 - DNA, 36 bp, synthetic construct; identical to SEQ ID NO: 24508
  misc_feature 1..36: note = Synthetic oligonucleotide
  source 1..36: mol_type = other DNA

SEQ ID NO: 24510 - DNA, 36 bp, synthetic construct
  misc_feature 1..36: note = Synthetic oligonucleotide
  source 1..36: mol_type = other DNA
agactagcagttcagaaatcgaaggccagcggcagc

SEQ ID NO: 24511 - DNA, 36 bp, synthetic construct
  misc_feature 1..36: note = Synthetic oligonucleotide
  source 1..36: mol_type = other DNA
agagtagcaaaacgagagacggccgcaatccgcagc

SEQ ID NO: 24512 - DNA, 36 bp, synthetic construct; identical to SEQ ID NO: 24511
  misc_feature 1..36: note = Synthetic oligonucleotide
  source 1..36: mol_type = other DNA

SEQ ID NO: 24513 - DNA, 36 bp, synthetic construct; identical to SEQ ID NO: 24511
  misc_feature 1..36: note = Synthetic oligonucleotide
  source 1..36: mol_type = other DNA

SEQ ID NO: 24514 - DNA, 36 bp, synthetic construct
  misc_feature 1..36: note = Synthetic oligonucleotide
  source 1..36: mol_type = other DNA
agagtagcaaatcgagagacggccgcaatccgcagc

SEQ ID NO: 24515 - DNA, 36 bp, synthetic construct; identical to SEQ ID NO: 24514
  misc_feature 1..36: note = Synthetic oligonucleotide
  source 1..36: mol_type = other DNA

SEQ ID NO: 24516 - DNA, 36 bp, synthetic construct
  misc_feature 1..36: note = Synthetic oligonucleotide
  source 1..36: mol_type = other DNA
agagtagcaaatctagatcggtatggcaaccgtaac

SEQ ID NO: 24517 - DNA, 36 bp, synthetic construct; identical to SEQ ID NO: 24516
  misc_feature 1..36: note = Synthetic oligonucleotide
  source 1..36: mol_type = other DNA

SEQ ID NO: 24518 - DNA, 36 bp, synthetic construct; identical to SEQ ID NO: 24516
  misc_feature 1..36: note = Synthetic oligonucleotide
  source 1..36: mol_type = other DNA

SEQ ID NO: 24519 - DNA, 36 bp, synthetic construct; identical to SEQ ID NO: 24516
  misc_feature 1..36: note = Synthetic oligonucleotide
  source 1..36: mol_type = other DNA

SEQ ID NO: 24520 - DNA, 36 bp, synthetic construct
  misc_feature 1..36: note = Synthetic oligonucleotide
  source 1..36: mol_type = other DNA
agagtagcggatcagagatcgcggtccagcggcaac

SEQ ID NO: 24521 - DNA, 36 bp, synthetic construct
  misc_feature 1..36: note = Synthetic oligonucleotide
  source 1..36: mol_type = other DNA
agagtgccccccccggtttttgaatcaaggcaaagc

SEQ ID NO: 24522 - DNA, 20 bp, synthetic construct
  misc_feature 1..20: note = Synthetic oligonucleotide
  source 1..20: mol_type = other DNA
agagtgtagctatccggggt

SEQ ID NO: 24523 - DNA, 31 bp, synthetic construct
  misc_feature 1..31: note = Synthetic oligonucleotide
  source 1..31: mol_type = other DNA
agatacaaactttctcaaagcaattcacaac

SEQ ID NO: 24524 - DNA, 36 bp, synthetic construct
  misc_feature 1..36: note = Synthetic oligonucleotide
  source 1..36: mol_type = other DNA
agattagcagaacaagaatagcggctcaaccgcaac

SEQ ID NO: 24525 - DNA, 36 bp, synthetic construct; identical to SEQ ID NO: 24524
  misc_feature 1..36: note = Synthetic oligonucleotide
  source 1..36: mol_type = other DNA

SEQ ID NO: 24526 - DNA, 36 bp, synthetic construct; identical to SEQ ID NO: 24524
  misc_feature 1..36: note = Synthetic oligonucleotide
  source 1..36: mol_type = other DNA

SEQ ID NO: 24527 - DNA, 36 bp, synthetic construct
  misc_feature 1..36: note = Synthetic oligonucleotide
  source 1..36: mol_type = other DNA
agattagcagagggaaattgggagggcaaccacggc

SEQ ID NO: 24528 - DNA, 19 bp, synthetic construct
  misc_feature 1..19: note = Synthetic oligonucleotide
  source 1..19: mol_type = other DNA
agcagccaaagcgtcctga

SEQ ID NO: 24529 - DNA, 36 bp, synthetic construct; identical to SEQ ID NO: 10697
  misc_feature 1..36: note = Synthetic oligonucleotide
  source 1..36: mol_type = other DNA

SEQ ID NO: 24530 - DNA, 36 bp, synthetic construct
  misc_feature 1..36: note = Synthetic oligonucleotide
  source 1..36: mol_type = other DNA
agcatagccattcagaaatcgcggtccaactgcaac

SEQ ID NO: 24531 - DNA, 37 bp, synthetic construct
  misc_feature 1..37: note = Synthetic oligonucleotide
  source 1..37: mol_type = other DNA
agccctagtgcgttgcaattcaatcagctgttataat

SEQ ID NO: 24532 - DNA, 36 bp, synthetic construct
  misc_feature 1..36: note = Synthetic oligonucleotide
  source 1..36: mol_type = other DNA
agcctaacagttcagaaaacgcggtccagcggcaac

SEQ ID NO: 24533 - DNA, 36 bp, synthetic construct; identical to SEQ ID NO: 10703
  misc_feature 1..36: note = Synthetic oligonucleotide
  source 1..36: mol_type = other DNA

SEQ ID NO: 24534 - DNA, 36 bp, synthetic construct; identical to SEQ ID NO: 10703
  misc_feature 1..36: note = Synthetic oligonucleotide
  source 1..36: mol_type = other DNA

SEQ ID NO: 24535 - DNA, 36 bp, synthetic construct
  misc_feature 1..36: note = Synthetic oligonucleotide
  source 1..36: mol_type = other DNA
agcctaccacagggaaaccggtagggaagccacggc

SEQ ID NO: 24536 - DNA, 36 bp, synthetic construct; identical to SEQ ID NO: 10708
  misc_feature 1..36: note = Synthetic oligonucleotide
  source 1..36: mol_type = other DNA

SEQ ID NO: 24537 - DNA, 36 bp, synthetic construct; identical to SEQ ID NO: 10708
  misc_feature 1..36: note = Synthetic oligonucleotide
  source 1..36: mol_type = other DNA

SEQ ID NO: 24538 - DNA, 36 bp, synthetic construct; identical to SEQ ID NO: 10708
  misc_feature 1..36: note = Synthetic oligonucleotide
  source 1..36: mol_type = other DNA

SEQ ID NO: 24539 - DNA, 36 bp, synthetic construct; identical to SEQ ID NO: 10708
  misc_feature 1..36: note = Synthetic oligonucleotide
  source 1..36: mol_type = other DNA

SEQ ID NO: 24540 - DNA, 36 bp, synthetic construct
  misc_feature 1..36: note = Synthetic oligonucleotide
  source 1..36: mol_type = other DNA
agcctaccacggggaaatcggcagggaagccacggc

SEQ ID NO: 24541 - DNA, 36 bp, synthetic construct; identical to SEQ ID NO: 10710
  misc_feature 1..36: note = Synthetic oligonucleotide
  source 1..36: mol_type = other DNA

SEQ ID NO: 24542 - DNA, 36 bp, synthetic construct; identical to SEQ ID NO: 10710
  misc_feature 1..36: note = Synthetic oligonucleotide
  source 1..36: mol_type = other DNA

SEQ ID NO: 24543 - DNA, 36 bp, synthetic construct; identical to SEQ ID NO: 10710
  misc_feature 1..36: note = Synthetic oligonucleotide
  source 1..36: mol_type = other DNA

SEQ ID NO: 24544 - DNA, 36 bp, synthetic construct; identical to SEQ ID NO: 10710
  misc_feature 1..36: note = Synthetic oligonucleotide
  source 1..36: mol_type = other DNA

SEQ ID NO: 24545 - DNA, 38 bp, synthetic construct
  misc_feature 1..38: note = Synthetic oligonucleotide
  source 1..38: mol_type = other DNA
agcctaccacggggaaatcggtagggaagccacggccc

SEQ ID NO: 24546 - DNA, 38 bp, synthetic construct; identical to SEQ ID NO: 24545
  misc_feature 1..38: note = Synthetic oligonucleotide
  source 1..38: mol_type = other DNA

SEQ ID NO: 24547 - DNA, 36 bp, synthetic construct; identical to SEQ ID NO: 10711
  misc_feature 1..36: note = Synthetic oligonucleotide
  source 1..36: mol_type = other DNA

SEQ ID NO: 24548 - DNA, 36 bp, synthetic construct
  misc_feature 1..36: note = Synthetic oligonucleotide
  source 1..36: mol_type = other DNA
agcctaccactgggaaatcggtagggaagccacggc

SEQ ID NO: 24549 - DNA, 36 bp, synthetic construct
  misc_feature 1..36: note = Synthetic oligonucleotide
  source 1..36: mol_type = other DNA
agcctaccagtgcgaagtcggtagggaaaccacggc

SEQ ID NO: 24550 - DNA, 36 bp, synthetic construct
  misc_feature 1..36: note = Synthetic oligonucleotide
  source 1..36: mol_type = other DNA
agcctaccataggaagatcggtagggaaaccacggc

SEQ ID NO: 24551 - DNA, 36 bp, synthetic construct
  misc_feature 1..36: note = Synthetic oligonucleotide
  source 1..36: mol_type = other DNA
agcctacctcagggaaatcggtagggaaaccacggc

SEQ ID NO: 24552 - DNA, 36 bp, synthetic construct
  misc_feature 1..36: note = Synthetic oligonucleotide
  source 1..36: mol_type = other DNA
agcctacctgatgggagtcggtagggaaaccacggc

SEQ ID NO: 24553 - DNA, 36 bp, synthetic construct; identical to SEQ ID NO: 24552
  misc_feature 1..36: note = Synthetic oligonucleotide
  source 1..36: mol_type = other DNA

SEQ ID NO: 24554 - DNA, 36 bp, synthetic construct; identical to SEQ ID NO: 10729
  misc_feature 1..36: note = Synthetic oligonucleotide
  source 1..36: mol_type = other DNA

SEQ ID NO: 24555 - DNA, 36 bp, synthetic construct; identical to SEQ ID NO: 10729
  misc_feature 1..36: note = Synthetic oligonucleotide
  source 1..36: mol_type = other DNA

SEQ ID NO: 24556 - DNA, 36 bp, synthetic construct; identical to SEQ ID NO: 10733
  misc_feature 1..36: note = Synthetic oligonucleotide
  source 1..36: mol_type = other DNA

SEQ ID NO: 24557 - DNA, 36 bp, synthetic construct
  misc_feature 1..36: note = Synthetic oligonucleotide
  source 1..36: mol_type = other DNA
agcctgcgcgccccggctttggattcaaggcaaagc

SEQ ID NO: 24558 - DNA, 36 bp, synthetic construct; identical to SEQ ID NO: 10744
  misc_feature 1..36: note = Synthetic oligonucleotide
  source 1..36: mol_type = other DNA

SEQ ID NO: 24559 - DNA, 35 bp, synthetic construct; identical to SEQ ID NO: 10745
  misc_feature 1..35: note = Synthetic oligonucleotide
  source 1..35: mol_type = other DNA

SEQ ID NO: 24560 - DNA, 36 bp, synthetic construct; identical to SEQ ID NO: 10747
  misc_feature 1..36: note = Synthetic oligonucleotide
  source 1..36: mol_type = other DNA

SEQ ID NO: 24561 - DNA, 36 bp, synthetic construct; identical to SEQ ID NO: 10747
  misc_feature 1..36: note = Synthetic oligonucleotide
  source 1..36: mol_type = other DNA

SEQ ID NO: 24562 - DNA, 36 bp, synthetic construct; identical to SEQ ID NO: 10747
  misc_feature 1..36: note = Synthetic oligonucleotide
  source 1..36: mol_type = other DNA

SEQ ID NO: 24563 - DNA, 36 bp, synthetic construct; identical to SEQ ID NO: 10747
  misc_feature 1..36: note = Synthetic oligonucleotide
  source 1..36: mol_type = other DNA

SEQ ID NO: 24564 - DNA, 36 bp, synthetic construct; identical to SEQ ID NO: 10747
  misc_feature 1..36: note = Synthetic oligonucleotide
  source 1..36: mol_type = other DNA

SEQ ID NO: 24565 - DNA, 36 bp, synthetic construct
  misc_feature 1..36: note = Synthetic oligonucleotide
  source 1..36: mol_type = other DNA
agcgtatcagagattaattagacgatcaactataac

SEQ ID NO: 24566 - DNA, 36 bp, synthetic construct
  misc_feature 1..36: note = Synthetic oligonucleotide
  source 1..36: mol_type = other DNA
agcgtatcagagattaattagacggtcaactataac

SEQ ID NO: 24567 - DNA, 36 bp, synthetic construct; identical to SEQ ID NO: 24566
  misc_feature 1..36: note = Synthetic oligonucleotide
  source 1..36: mol_type = other DNA

SEQ ID NO: 24568 - DNA, 36 bp, synthetic construct
  misc_feature 1..36: note = Synthetic oligonucleotide
  source 1..36: mol_type = other DNA
agcgtatccgaggggcggttcccgaccaaccacagc

SEQ ID NO: 24569 - DNA, 36 bp, synthetic construct
  misc_feature 1..36: note = Synthetic oligonucleotide
  source 1..36: mol_type = other DNA
agcgtatctgagcgaaggttcccgaccgactccagc

SEQ ID NO: 24570 - DNA, 36 bp, synthetic construct; identical to SEQ ID NO: 10748
  misc_feature 1..36: note = Synthetic oligonucleotide
  source 1..36: mol_type = other DNA

SEQ ID NO: 24571 - DNA, 37 bp, synthetic construct
  misc_feature 1..37: note = Synthetic oligonucleotide
  source 1..37: mol_type = other DNA
agctatggtttgccgggaaccgcttctgagatacact

SEQ ID NO: 24572 - DNA, 31 bp, synthetic construct
  misc_feature 1..31: note = Synthetic oligonucleotide
  source 1..31: mol_type = other DNA
agctccccgccacactccgaagtggtacgct

SEQ ID NO: 24573 - DNA, 37 bp, synthetic construct
  misc_feature 1..37: note = Synthetic oligonucleotide
  source 1..37: mol_type = other DNA
agctgggaatcaatcacctctcccccctgatatactt

SEQ ID NO: 24574 - DNA, 32 bp, synthetic construct
  misc_feature 1..32: note = Synthetic oligonucleotide
  source 1..32: mol_type = other DNA
agctgtttccaatggatcaaagatactaattt

SEQ ID NO: 24575 - DNA, 36 bp, synthetic construct
  misc_feature 1..36: note = Synthetic oligonucleotide
  source 1..36: mol_type = other DNA
agcttaccacagggaaatcggtagggaagccacggc

SEQ ID NO: 24576 - DNA, 36 bp, synthetic construct
  misc_feature 1..36: note = Synthetic oligonucleotide
  source 1..36: mol_type = other DNA
agcttagaccatccggacttgggggcaacccgcaac

SEQ ID NO: 24577 - DNA, 36 bp, synthetic construct
  misc_feature 1..36: note = Synthetic oligonucleotide
  source 1..36: mol_type = other DNA
agcttagcagggggaaagccgaggggaaaccacggc

SEQ ID NO: 24578 - DNA, 36 bp, synthetic construct
  misc_feature 1..36: note = Synthetic oligonucleotide
  source 1..36: mol_type = other DNA
agcttagcagtatgagcggcgcggcccaaccggaac

SEQ ID NO: 24579 - DNA, 36 bp, synthetic construct; identical to SEQ ID NO: 10756
  misc_feature 1..36: note = Synthetic oligonucleotide
  source 1..36: mol_type = other DNA

SEQ ID NO: 24580 - DNA, 36 bp, synthetic construct; identical to SEQ ID NO: 10759
  misc_feature 1..36: note = Synthetic oligonucleotide
  source 1..36: mol_type = other DNA

SEQ ID NO: 24581 - DNA, 36 bp, synthetic construct
  misc_feature 1..36: note = Synthetic oligonucleotide
  source 1..36: mol_type = other DNA
agcttagcatttcagagatcgtggtccagccgcagc

SEQ ID NO: 24582 - DNA, 36 bp, synthetic construct; identical to SEQ ID NO: 24581
  misc_feature 1..36: note = Synthetic oligonucleotide
  source 1..36: mol_type = other DNA

SEQ ID NO: 24583 - DNA, 36 bp, synthetic construct
  misc_feature 1..36: note = Synthetic oligonucleotide
  source 1..36: mol_type = other DNA
agcttagccgatgggaattcgcggtccaaccgcaac

SEQ ID NO: 24584 - DNA, 36 bp, synthetic construct; identical to SEQ ID NO: 24583
  misc_feature 1..36: note = Synthetic oligonucleotide
  source 1..36: mol_type = other DNA

SEQ ID NO: 24585 - DNA, 36 bp, synthetic construct
  misc_feature 1..36: note = Synthetic oligonucleotide
  source 1..36: mol_type = other DNA
agcttagccgcttagagatcgaaggccagccgcaac

SEQ ID NO: 24586 - DNA, 36 bp, synthetic construct
  misc_feature 1..36: note = Synthetic oligonucleotide
  source 1..36: mol_type = other DNA
agcttagcctaatcggaacggtggggaaactatggc

SEQ ID NO: 24587 - DNA, 36 bp, synthetic construct
  misc_feature 1..36: note = Synthetic oligonucleotide
  source 1..36: mol_type = other DNA
agcttagcggtctggtgagtgagagccaaccgcaac

SEQ ID NO: 24588 - DNA, 36 bp, synthetic construct
  misc_feature 1..36: note = Synthetic oligonucleotide
  source 1..36: mol_type = other DNA
agcttagcggtctggtgattgagagccaaccgcaac

SEQ ID NO: 24589 - DNA, 36 bp, synthetic construct
  misc_feature 1..36: note = Synthetic oligonucleotide
  source 1..36: mol_type = other DNA
agcttagcggtctggtgattgagggccaaccgcaac

SEQ ID NO: 24590 - DNA, 36 bp, synthetic construct
  misc_feature 1..36: note = Synthetic oligonucleotide
  source 1..36: mol_type = other DNA
agcttagtcgattgggaaatgcgctctggccggaac

SEQ ID NO: 24591 - DNA, 36 bp, synthetic construct; identical to SEQ ID NO: 10765
  misc_feature 1..36: note = Synthetic oligonucleotide
  source 1..36: mol_type = other DNA

SEQ ID NO: 24592 - DNA, 36 bp, synthetic construct; identical to SEQ ID NO: 10765
  misc_feature 1..36: note = Synthetic oligonucleotide
  source 1..36: mol_type = other DNA

SEQ ID NO: 24593 - DNA, 36 bp, synthetic construct; identical to SEQ ID NO: 10765
  misc_feature 1..36: note = Synthetic oligonucleotide
  source 1..36: mol_type = other DNA

SEQ ID NO: 24594 - DNA, 37 bp, synthetic construct
  misc_feature 1..37: note = Synthetic oligonucleotide
  source 1..37: mol_type = other DNA
agctttgccttgattccaattcttaggcagacaaact

SEQ ID NO: 24595 - DNA, 32 bp, synthetic construct
  misc_feature 1..32: note = Synthetic oligonucleotide
  source 1..32: mol_type = other DNA
aggaaagtaacattttgaaagcaattcacaac

SEQ ID NO: 24596 - DNA, 23 bp, synthetic construct
  misc_feature 1..23: note = Synthetic oligonucleotide
  source 1..23: mol_type = other DNA
aggaatcaccgctcacgtacact

SEQ ID NO: 24597 - DNA, 22 bp, synthetic construct
  misc_feature 1..22: note = Synthetic oligonucleotide
  source 1..22: mol_type = other DNA
aggagctccgtcgaggaaaaag

SEQ ID NO: 24598 - DNA, 36 bp, synthetic construct
  misc_feature 1..36: note = Synthetic oligonucleotide
  source 1..36: mol_type = other DNA
aggatagcgattggggaatcggaggccaactgcaac

SEQ ID NO: 24599 - DNA, 36 bp, synthetic construct
  misc_feature 1..36: note = Synthetic oligonucleotide
  source 1..36: mol_type = other DNA
aggatctctcccccgcgtttggaatcaaggcaaagc

SEQ ID NO: 24600 - DNA, 36 bp, synthetic construct
  misc_feature 1..36: note = Synthetic oligonucleotide
  source 1..36: mol_type = other DNA
aggatgccaccatcggaatttgaatcaaggcaaagc

SEQ ID NO: 24601 - DNA, 29 bp, synthetic construct
  misc_feature 1..29: note = Synthetic oligonucleotide
  source 1..29: mol_type = other DNA
aggcacggaatctgaaagctaatcacaac

SEQ ID NO: 24602 - DNA, 36 bp, synthetic construct
  misc_feature 1..36: note = Synthetic oligonucleotide
  source 1..36: mol_type = other DNA
aggctagcagatcaggaaatgcgctccagccgaaac

SEQ ID NO: 24603 - DNA, 36 bp, synthetic construct
  misc_feature 1..36: note = Synthetic oligonucleotide
  source 1..36: mol_type = other DNA
agggtaacaagacgagaggcgaccgcaagccgcagc

SEQ ID NO: 24604 - DNA, 37 bp, synthetic construct
  misc_feature 1..37: note = Synthetic oligonucleotide
  source 1..37: mol_type = other DNA
agggtaccagggcgctccgacggtggggtatcggaac

SEQ ID NO: 24605 - DNA, 36 bp, synthetic construct
  misc_feature 1..36: note = Synthetic oligonucleotide
  source 1..36: mol_type = other DNA
agggtagcaaatcgagaggcggccgcaatccgcagc

SEQ ID NO: 24606 - DNA, 36 bp, synthetic construct
  misc_feature 1..36: note = Synthetic oligonucleotide
  source 1..36: mol_type = other DNA
agggtagcacagagaggaagagccgcagtccgcagt

SEQ ID NO: 24607 - DNA, 36 bp, synthetic construct; identical to SEQ ID NO: 24606
  misc_feature 1..36: note = Synthetic oligonucleotide
  source 1..36: mol_type = other DNA

SEQ ID NO: 24608 - DNA, 36 bp, synthetic construct; identical to SEQ ID NO: 24606
  misc_feature 1..36: note = Synthetic oligonucleotide
  source 1..36: mol_type = other DNA

SEQ ID NO: 24609 - DNA, 36 bp, synthetic construct; identical to SEQ ID NO: 24606
  misc_feature 1..36: note = Synthetic oligonucleotide
  source 1..36: mol_type = other DNA

SEQ ID NO: 24610 - DNA, 36 bp, synthetic construct
  misc_feature 1..36: note = Synthetic oligonucleotide
  source 1..36: mol_type = other DNA
agggtagctaatcgaaatctgcggtcaacccgcaac

SEQ ID NO: 24611 - DNA, 36 bp, synthetic construct; identical to SEQ ID NO: 24610
  misc_feature 1..36: note = Synthetic oligonucleotide
  source 1..36: mol_type = other DNA

SEQ ID NO: 24612 - DNA, 36 bp, synthetic construct; identical to SEQ ID NO: 24610
  misc_feature 1..36: note = Synthetic oligonucleotide
  source 1..36: mol_type = other DNA

SEQ ID NO: 24613 - DNA, 29 bp, synthetic construct
  misc_feature 1..29: note = Synthetic oligonucleotide
  source 1..29: mol_type = other DNA
aggtacggaatctgaaagctaatcacaac

SEQ ID NO: 24614 - DNA, 29 bp, synthetic construct
  misc_feature 1..29: note = Synthetic oligonucleotide
  source 1..29: mol_type = other DNA
aggtacggaatctgaaagctaatcacaac

SEQ ID NO: 24615 - DNA, 38 bp, synthetic construct
  misc_feature 1..38: note = Synthetic oligonucleotide
  source 1..38: mol_type = other DNA
aggtcctaccacaggcaaatcggtagggaaaccacggc

SEQ ID NO: 24616 - DNA, 24 bp, synthetic construct
  misc_feature 1..24: note = Synthetic oligonucleotide
  source 1..24: mol_type = other DNA
aggtgttaaatgttaggtgttgat

SEQ ID NO: 24617 - DNA, 36 bp, synthetic construct; identical to SEQ ID NO: 10773
  misc_feature 1..36: note = Synthetic oligonucleotide
  source 1..36: mol_type = other DNA

SEQ ID NO: 24618 - DNA, 36 bp, synthetic construct; identical to SEQ ID NO: 10773
  misc_feature 1..36: note = Synthetic oligonucleotide
  source 1..36: mol_type = other DNA

SEQ ID NO: 24619 - DNA, 36 bp, synthetic construct; identical to SEQ ID NO: 10773
  misc_feature 1..36: note = Synthetic oligonucleotide
  source 1..36: mol_type = other DNA

SEQ ID NO: 24620 - DNA, 36 bp, synthetic construct
  misc_feature 1..36: note = Synthetic oligonucleotide
  source 1..36: mol_type = other DNA
aggttagcagatcaggaattgcgctctagccggaac

SEQ ID NO: 24621 - DNA, 36 bp, synthetic construct; identical to SEQ ID NO: 10774
  misc_feature 1..36: note = Synthetic oligonucleotide
  source 1..36: mol_type = other DNA

SEQ ID NO: 24622 - DNA, 36 bp, synthetic construct
  misc_feature 1..36: note = Synthetic oligonucleotide
  source 1..36: mol_type = other DNA
aggttagccgatcaggaagtgtgggccaaccgcaac

SEQ ID NO: 24623 - DNA, 21 bp, synthetic construct
  misc_feature 1..21: note = Synthetic oligonucleotide
  source 1..21: mol_type = other DNA
aggtttacacctgtgttattt

SEQ ID NO: 24624 - DNA, 22 bp, synthetic construct
  misc_feature 1..22: note = Synthetic oligonucleotide
  source 1..22: mol_type = other DNA
aggtttgagagctttgttaatt

SEQ ID NO: 24625 - DNA, 19 bp, synthetic construct
  misc_feature 1..19: note = Synthetic oligonucleotide
  source 1..19: mol_type = other DNA
aggttttggagtagtgtaa

SEQ ID NO: 24626 - DNA, 31 bp, synthetic construct
  misc_feature 1..31: note = Synthetic oligonucleotide
  source 1..31: mol_type = other DNA
agtaccatacatttttacatcattctcaaac

SEQ ID NO: 24627 - DNA, 27 bp, synthetic construct
  misc_feature 1..27: note = Synthetic oligonucleotide
  source 1..27: mol_type = other DNA
agtagaaattatatagggttattaaac

SEQ ID NO: 24628 - DNA, 27 bp, synthetic construct
  misc_feature 1..27: note = Synthetic oligonucleotide
  source 1..27: mol_type = other DNA
agtagaaattatatagggttattaaac

SEQ ID NO: 24629 - DNA, 27 bp, synthetic construct
  misc_feature 1..27: note = Synthetic oligonucleotide
  source 1..27: mol_type = other DNA
agtagaaattatatagggttattaaac

SEQ ID NO: 24630 - DNA, 27 bp, synthetic construct
  misc_feature 1..27: note = Synthetic oligonucleotide
  source 1..27: mol_type = other DNA
agtagaaattatatagggttattaaac

SEQ ID NO: 24631 - DNA, 37 bp, synthetic construct
  misc_feature 1..37: note = Synthetic oligonucleotide
  source 1..37: mol_type = other DNA
agtagtgtttaaacaaggcctgtccgcaagctaaaac

SEQ ID NO: 24632 - DNA, 36 bp, synthetic construct; identical to SEQ ID NO: 10778
  misc_feature 1..36: note = Synthetic oligonucleotide
  source 1..36: mol_type = other DNA

SEQ ID NO: 24633 - DNA, 36 bp, synthetic construct
  misc_feature 1..36: note = Synthetic oligonucleotide
  source 1..36: mol_type = other DNA
agtatacatcgtcgggatatgagcgctggccggaac

SEQ ID NO: 24634 - DNA, 36 bp, synthetic construct
  misc_feature 1..36: note = Synthetic oligonucleotide
  source 1..36: mol_type = other DNA
agtatacctgagcgacgattttccgcaagctatagc

SEQ ID NO: 24635 - DNA, 36 bp, synthetic construct; identical to SEQ ID NO: 10780
  misc_feature 1..36: note = Synthetic oligonucleotide
  source 1..36: mol_type = other DNA

SEQ ID NO: 24636 - DNA, 36 bp, synthetic construct
  misc_feature 1..36: note = Synthetic oligonucleotide
  source 1..36: mol_type = other DNA
agtatacctgagcggggattccctaccaactacagc

SEQ ID NO: 24637 - DNA, 36 bp, synthetic construct; identical to SEQ ID NO: 24636
  misc_feature 1..36: note = Synthetic oligonucleotide
  source 1..36: mol_type = other DNA

SEQ ID NO: 24638 - DNA, 36 bp, synthetic construct; identical to SEQ ID NO: 10785
  misc_feature 1..36: note = Synthetic oligonucleotide
  source 1..36: mol_type = other DNA

SEQ ID NO: 24639 - DNA, 36 bp, synthetic construct; identical to SEQ ID NO: 10786
  misc_feature 1..36: note = Synthetic oligonucleotide
  source 1..36: mol_type = other DNA

SEQ ID NO: 24640 - DNA, 36 bp, synthetic construct; identical to SEQ ID NO: 10786
  misc_feature 1..36: note = Synthetic oligonucleotide
  source 1..36: mol_type = other DNA

SEQ ID NO: 24641 - DNA, 36 bp, synthetic construct; identical to SEQ ID NO: 10786
  misc_feature 1..36: note = Synthetic oligonucleotide
  source 1..36: mol_type = other DNA

SEQ ID NO: 24642 - DNA, 36 bp, synthetic construct
  misc_feature 1..36: note = Synthetic oligonucleotide
  source 1..36: mol_type = other DNA
agtatagcaggcttggatcggaagggaaactaggac

SEQ ID NO: 24643 - DNA, 36 bp, synthetic construct
  misc_feature 1..36: note = Synthetic oligonucleotide
  source 1..36: mol_type = other DNA
agtatagcaggttgggatatgcgctctggccggaac

SEQ ID NO: 24644 - DNA, 36 bp, synthetic construct
  misc_feature 1..36: note = Synthetic oligonucleotide
  source 1..36: mol_type = other DNA
agtatagcataacggtgtaaggatggaagctataac

SEQ ID NO: 24645 - DNA, 36 bp, synthetic construct; identical to SEQ ID NO: 10787
  misc_feature 1..36: note = Synthetic oligonucleotide
  source 1..36: mol_type = other DNA

SEQ ID NO: 24646 - DNA, 36 bp, synthetic construct
  misc_feature 1..36: note = Synthetic oligonucleotide
  source 1..36: mol_type = other DNA
agtatagccgctcagagattgcggtctagcggcagc

SEQ ID NO: 24647 - DNA, 36 bp, synthetic construct
  misc_feature 1..36: note = Synthetic oligonucleotide
  source 1..36: mol_type = other DNA
agtatagcgtatccgagtgagaaagggggctataac

SEQ ID NO: 24648 - DNA, 36 bp, synthetic construct; identical to SEQ ID NO: 24647
  misc_feature 1..36: note = Synthetic oligonucleotide
  source 1..36: mol_type = other DNA

SEQ ID NO: 24649 - DNA, 36 bp, synthetic construct; identical to SEQ ID NO: 10792
  misc_feature 1..36: note = Synthetic oligonucleotide
  source 1..36: mol_type = other DNA

SEQ ID NO: 24650 - DNA, 36 bp, synthetic construct
  misc_feature 1..36: note = Synthetic oligonucleotide
  source 1..36: mol_type = other DNA
agtatatcagaccagagagagggagggggctataac

SEQ ID NO: 24651 - DNA, 36 bp, synthetic construct; identical to SEQ ID NO: 24650
  misc_feature 1..36: note = Synthetic oligonucleotide
  source 1..36: mol_type = other DNA

SEQ ID NO: 24652 - DNA, 36 bp, synthetic construct
  misc_feature 1..36: note = Synthetic oligonucleotide
  source 1..36: mol_type = other DNA
agtatatcagaccagagagagggaggggtctataac

SEQ ID NO: 24653 - DNA, 36 bp, synthetic construct; identical to SEQ ID NO: 10797
  misc_feature 1..36: note = Synthetic oligonucleotide
  source 1..36: mol_type = other DNA

SEQ ID NO: 24654 - DNA, 36 bp, synthetic construct; identical to SEQ ID NO: 10797
  misc_feature 1..36: note = Synthetic oligonucleotide
  source 1..36: mol_type = other DNA

SEQ ID NO: 24655 - DNA, 36 bp, synthetic construct; identical to SEQ ID NO: 10800
  misc_feature 1..36: note = Synthetic oligonucleotide
  source 1..36: mol_type = other DNA

SEQ ID NO: 24656 - DNA, 36 bp, synthetic construct
  misc_feature 1..36: note = Synthetic oligonucleotide
  source 1..36: mol_type = other DNA
agtatcgtttttccaattttttaatcaatccacaac

SEQ ID NO: 24657 - DNA, 36 bp, synthetic construct; identical to SEQ ID NO: 10802
  misc_feature 1..36: note = Synthetic oligonucleotide
  source 1..36: mol_type = other DNA

SEQ ID NO: 24658 - DNA, 36 bp, synthetic construct
  misc_feature 1..36: note = Synthetic oligonucleotide
  source 1..36: mol_type = other DNA
agtatgccccccccggttttggaatcaaggcaaagc

SEQ ID NO: 24659 - DNA, 36 bp, synthetic construct
  misc_feature 1..36: note = Synthetic oligonucleotide
  source 1..36: mol_type = other DNA
agtatgcgcccgccgatttaggaatcaaggcaaagc

SEQ ID NO: 24660 - DNA, 36 bp, synthetic construct; identical to SEQ ID NO: 10804
  misc_feature 1..36: note = Synthetic oligonucleotide
  source 1..36: mol_type = other DNA

SEQ ID NO: 24661 - DNA, 36 bp, synthetic construct
  misc_feature 1..36: note = Synthetic oligonucleotide
  source 1..36: mol_type = other DNA
agtattagttaactgattttctgagggtaccaaaac

SEQ ID NO: 24662 - DNA, 37 bp, synthetic construct
  misc_feature 1..37: note = Synthetic oligonucleotide
  source 1..37: mol_type = other DNA
agtcacaaagatacaaattttgaaagtaattcacaac

SEQ ID NO: 24663 - DNA, 37 bp, synthetic construct; identical to SEQ ID NO: 24662
  misc_feature 1..37: note = Synthetic oligonucleotide
  source 1..37: mol_type = other DNA

SEQ ID NO: 24664 - DNA, 36 bp, synthetic construct
  misc_feature 1..36: note = Synthetic oligonucleotide
  source 1..36: mol_type = other DNA
agtctaaacgattgggatatgcgctctgaccggaac

SEQ ID NO: 24665 - DNA, 36 bp, synthetic construct; identical to SEQ ID NO: 10807
  misc_feature 1..36: note = Synthetic oligonucleotide
  source 1..36: mol_type = other DNA

SEQ ID NO: 24666 - DNA, 36 bp, synthetic construct; identical to SEQ ID NO: 10808
  misc_feature 1..36: note = Synthetic oligonucleotide
  source 1..36: mol_type = other DNA

SEQ ID NO: 24667 - DNA, 36 bp, synthetic construct
  misc_feature 1..36: note = Synthetic oligonucleotide
  source 1..36: mol_type = other DNA
agtctaactgagcgatgcttcccggccgttcacaac

SEQ ID NO: 24668 - DNA, 36 bp, synthetic construct; identical to SEQ ID NO: 10809
  misc_feature 1..36: note = Synthetic oligonucleotide
  source 1..36: mol_type = other DNA

SEQ ID NO: 24669 - DNA, 36 bp, synthetic construct; identical to SEQ ID NO: 10809
  misc_feature 1..36: note = Synthetic oligonucleotide
  source 1..36: mol_type = other DNA

SEQ ID NO: 24670 - DNA, 36 bp, synthetic construct
  misc_feature 1..36: note = Synthetic oligonucleotide
  source 1..36: mol_type = other DNA
agtctagacgattgggaaatgcgctctgaccggaac

SEQ ID NO: 24671 - DNA, 36 bp, synthetic construct; identical to SEQ ID NO: 24670
  misc_feature 1..36: note = Synthetic oligonucleotide
  source 1..36: mol_type = other DNA

SEQ ID NO: 24672 - DNA, 36 bp, synthetic construct; identical to SEQ ID NO: 24670
  misc_feature 1..36: note = Synthetic oligonucleotide
  source 1..36: mol_type = other DNA

SEQ ID NO: 24673 - DNA, 36 bp, synthetic construct; identical to SEQ ID NO: 10812
  misc_feature 1..36: note = Synthetic oligonucleotide
  source 1..36: mol_type = other DNA

SEQ ID NO: 24674 - DNA, 36 bp, synthetic construct
  misc_feature 1..36: note = Synthetic oligonucleotide
  source 1..36: mol_type = other DNA
agtctagacgattgggatatgcgctctagccggaac

SEQ ID NO: 24675 - DNA, 36 bp, synthetic construct; identical to SEQ ID NO: 10815
  misc_feature 1..36: note = Synthetic oligonucleotide
  source 1..36: mol_type = other DNA

SEQ ID NO: 24676 - DNA, 36 bp, synthetic construct; identical to SEQ ID NO: 10815
  misc_feature 1..36: note = Synthetic oligonucleotide
  source 1..36: mol_type = other DNA

SEQ ID NO: 24677 - DNA, 36 bp, synthetic construct; identical to SEQ ID NO: 10815
  misc_feature 1..36: note = Synthetic oligonucleotide
  source 1..36: mol_type = other DNA

SEQ ID NO: 24678 - DNA, 36 bp, synthetic construct; identical to SEQ ID NO: 10815
  misc_feature 1..36: note = Synthetic oligonucleotide
  source 1..36: mol_type = other DNA

SEQ ID NO: 24679 - DNA, 36 bp, synthetic construct
  misc_feature 1..36: note = Synthetic oligonucleotide
  source 1..36: mol_type = other DNA
agtctagacgattgggatatgtgctctagccggaac

SEQ ID NO: 24680 - DNA, 36 bp, synthetic construct
  misc_feature 1..36: note = Synthetic oligonucleotide
  source 1..36: mol_type = other DNA
agtctagacgctcgggatatgagcactggccggaac

SEQ ID NO: 24681 - DNA, 36 bp, synthetic construct
  misc_feature 1..36: note = Synthetic oligonucleotide
  source 1..36: mol_type = other DNA
agtctagacgcttggaaagcgtggtccagccgcaac

SEQ ID NO: 24682 - DNA, 36 bp, synthetic construct
  misc_feature 1..36: note = Synthetic oligonucleotide
  source 1..36: mol_type = other DNA
agtctagatcaccgggatatgcgatctggccggaac

SEQ ID NO: 24683 - DNA, 36 bp, synthetic construct
  misc_feature 1..36: note = Synthetic oligonucleotide
  source 1..36: mol_type = other DNA
agtctagatcactgggaaatgcgcaatggccggaac

SEQ ID NO: 24684 - DNA, 36 bp, synthetic construct
  misc_feature 1..36: note = Synthetic oligonucleotide
  source 1..36: mol_type = other DNA
agtctagatcactgggaaatgcgctctggccggaac

SEQ ID NO: 24685 - DNA, 36 bp, synthetic construct; identical to SEQ ID NO: 10817
  misc_feature 1..36: note = Synthetic oligonucleotide
  source 1..36: mol_type = other DNA

SEQ ID NO: 24686 - DNA, 36 bp, synthetic construct; identical to SEQ ID NO: 10817
  misc_feature 1..36: note = Synthetic oligonucleotide
  source 1..36: mol_type = other DNA

SEQ ID NO: 24687 - DNA, 36 bp, synthetic construct
  misc_feature 1..36: note = Synthetic oligonucleotide
  source 1..36: mol_type = other DNA
agtctagatcgctgggaaatgcgctctggccggaac

SEQ ID NO: 24688 - DNA, 36 bp, synthetic construct
  misc_feature 1..36: note = Synthetic oligonucleotide
  source 1..36: mol_type = other DNA
agtctagatgctcgggatatgagctctggccggaac

SEQ ID NO: 24689 - DNA, 36 bp, synthetic construct; identical to SEQ ID NO: 24688
  misc_feature 1..36: note = Synthetic oligonucleotide
  source 1..36: mol_type = other DNA

SEQ ID NO: 24690 - DNA, 36 bp, synthetic construct; identical to SEQ ID NO: 24688
  misc_feature 1..36: note = Synthetic oligonucleotide
  source 1..36: mol_type = other DNA

SEQ ID NO: 24691 - DNA, 36 bp, synthetic construct; identical to SEQ ID NO: 10819
  misc_feature 1..36: note = Synthetic oligonucleotide
  source 1..36: mol_type = other DNA

SEQ ID NO: 24692 - DNA, 36 bp, synthetic construct
  misc_feature 1..36: note = Synthetic oligonucleotide
  source 1..36: mol_type = other DNA
agtctagcacatgggaataggcggggctaggacaac

SEQ ID NO: 24693 - DNA, 36 bp, synthetic construct
  misc_feature 1..36: note = Synthetic oligonucleotide
  source 1..36: mol_type = other DNA
agtctagcactcaggaataggtggcgctaggacaac

SEQ ID NO: 24694 - DNA, 36 bp, synthetic construct; identical to SEQ ID NO: 24693
  misc_feature 1..36: note = Synthetic oligonucleotide
  source 1..36: mol_type = other DNA

SEQ ID NO: 24695 - DNA, 36 bp, synthetic construct
  misc_feature 1..36: note = Synthetic oligonucleotide
  source 1..36: mol_type = other DNA
agtctagcagattgggatttgtgctctgaccggaac

SEQ ID NO: 24696 - DNA, 36 bp, synthetic construct
  misc_feature 1..36: note = Synthetic oligonucleotide
  source 1..36: mol_type = other DNA
agtctagccgattgggttttgcgctctggccggaac

SEQ ID NO: 24697 - DNA, 36 bp, synthetic construct
  misc_feature 1..36: note = Synthetic oligonucleotide
  source 1..36: mol_type = other DNA
agtctagccgctcagggatcgggggccagccgcaac

SEQ ID NO: 24698 - DNA, 36 bp, synthetic construct; identical to SEQ ID NO: 24697
  misc_feature 1..36: note = Synthetic oligonucleotide
  source 1..36: mol_type = other DNA

SEQ ID NO: 24699 - DNA, 36 bp, synthetic construct
  misc_feature 1..36: note = Synthetic oligonucleotide
  source 1..36: mol_type = other DNA
agtctagcggtctggtgagtgagagccaaccgcaac

SEQ ID NO: 24700 - DNA, 36 bp, synthetic construct; identical to SEQ ID NO: 10826
  misc_feature 1..36: note = Synthetic oligonucleotide
  source 1..36: mol_type = other DNA

SEQ ID NO: 24701 - DNA, 36 bp, synthetic construct
  misc_feature 1..36: note = Synthetic oligonucleotide
  source 1..36: mol_type = other DNA
agtctagctatttagaaaacgcggtcaatccgcaac

SEQ ID NO: 24702 - DNA, 36 bp, synthetic construct; identical to SEQ ID NO: 24701
  misc_feature 1..36: note = Synthetic oligonucleotide
  source 1..36: mol_type = other DNA

SEQ ID NO: 24703 - DNA, 36 bp, synthetic construct
  misc_feature 1..36: note = Synthetic oligonucleotide
  source 1..36: mol_type = other DNA
agtctagctgatagggaatcgcgctcgagccggaac

SEQ ID NO: 24704 - DNA, 36 bp, synthetic construct; identical to SEQ ID NO: 24703
  misc_feature 1..36: note = Synthetic oligonucleotide
  source 1..36: mol_type = other DNA

SEQ ID NO: 24705 - DNA, 36 bp, synthetic construct; identical to SEQ ID NO: 24703
  misc_feature 1..36: note = Synthetic oligonucleotide
  source 1..36: mol_type = other DNA

SEQ ID NO: 24706 - DNA, 36 bp, synthetic construct
  misc_feature 1..36: note = Synthetic oligonucleotide
  source 1..36: mol_type = other DNA
agtctagctgattgggatatgcactctgaccggaac

SEQ ID NO: 24707 - DNA, 36 bp, synthetic construct
  misc_feature 1..36: note = Synthetic oligonucleotide
  source 1..36: mol_type = other DNA
agtctagctgattgggatttgcgctctggccggaac

SEQ ID NO: 24708 - DNA, 36 bp, synthetic construct; identical to SEQ ID NO: 10828
  misc_feature 1..36: note = Synthetic oligonucleotide
  source 1..36: mol_type = other DNA

SEQ ID NO: 24709 - DNA, 36 bp, synthetic construct; identical to SEQ ID NO: 10830
  misc_feature 1..36: note = Synthetic oligonucleotide
  source 1..36: mol_type = other DNA

SEQ ID NO: 24710 - DNA, 36 bp, synthetic construct; identical to SEQ ID NO: 10830
  misc_feature 1..36: note = Synthetic oligonucleotide
  source 1..36: mol_type = other DNA

SEQ ID NO: 24711 - DNA, 36 bp, synthetic construct; identical to SEQ ID NO: 10831
  misc_feature 1..36: note = Synthetic oligonucleotide
  source 1..36: mol_type = other DNA

SEQ ID NO: 24712 - DNA, 36 bp, synthetic construct; identical to SEQ ID NO: 10831
  misc_feature 1..36: note = Synthetic oligonucleotide
  source 1..36: mol_type = other DNA

SEQ ID NO: 24713 - DNA, 37 bp, synthetic construct
  misc_feature 1..37: note = Synthetic oligonucleotide
  source 1..37: mol_type = other DNA
agtctagtcgattgggaaatgcgctttgaccggaact

SEQ ID NO: 24714 - DNA, 36 bp, synthetic construct
  misc_feature 1..36: note = Synthetic oligonucleotide
  source 1..36: mol_type = other DNA
agtctagtcgattgggatatgagctctggccggaac

SEQ ID NO: 24715 - DNA, 36 bp, synthetic construct; identical to SEQ ID NO: 24714
  misc_feature 1..36: note = Synthetic oligonucleotide
  source 1..36: mol_type = other DNA

SEQ ID NO: 24716 - DNA, 36 bp, synthetic construct
  misc_feature 1..36: note = Synthetic oligonucleotide
  source 1..36: mol_type = other DNA
agtctatcaagtaagccgccgacacagccttggaac

SEQ ID NO: 24717 - DNA, 36 bp, synthetic construct
  misc_feature 1..36: note = Synthetic oligonucleotide
  source 1..36: mol_type = other DNA
agtctatcagtcaggaataggtggcgctaagacaac

SEQ ID NO: 24718 - DNA, 36 bp, synthetic construct; identical to SEQ ID NO: 24717
  misc_feature 1..36: note = Synthetic oligonucleotide
  source 1..36: mol_type = other DNA

SEQ ID NO: 24719 - DNA, 36 bp, synthetic construct
  misc_feature 1..36: note = Synthetic oligonucleotide
  source 1..36: mol_type = other DNA
agtctatccaacctcggcccgcgaccaacccgcaac

SEQ ID NO: 24720 - DNA, 36 bp, synthetic construct; identical to SEQ ID NO: 10836
  misc_feature 1..36: note = Synthetic oligonucleotide
  source 1..36: mol_type = other DNA

SEQ ID NO: 24721 - DNA, 36 bp, synthetic construct; identical to SEQ ID NO: 10836
  misc_feature 1..36: note = Synthetic oligonucleotide
  source 1..36: mol_type = other DNA

SEQ ID NO: 24722 - DNA, 36 bp, synthetic construct; identical to SEQ ID NO: 10836
  misc_feature 1..36: note = Synthetic oligonucleotide
  source 1..36: mol_type = other DNA

SEQ ID NO: 24723 - DNA, 36 bp, synthetic construct; identical to SEQ ID NO: 10836
  misc_feature 1..36: note = Synthetic oligonucleotide
  source 1..36: mol_type = other DNA

SEQ ID NO: 24724 - DNA, 36 bp, synthetic construct; identical to SEQ ID NO: 10837
  misc_feature 1..36: note = Synthetic oligonucleotide
  source 1..36: mol_type = other DNA

SEQ ID NO: 24725 - DNA, 36 bp, synthetic construct; identical to SEQ ID NO: 10837
  misc_feature 1..36: note = Synthetic oligonucleotide
  source 1..36: mol_type = other DNA

SEQ ID NO: 24726 - DNA, 36 bp, synthetic construct; identical to SEQ ID NO: 10837
  misc_feature 1..36: note = Synthetic oligonucleotide
  source 1..36: mol_type = other DNA

SEQ ID NO: 24727 - DNA, 36 bp, synthetic construct
  misc_feature 1..36: note = Synthetic oligonucleotide
  source 1..36: mol_type = other DNA
agtctattcgattgggaaatgcgctctgaccggaac

SEQ ID NO: 24728 - DNA, 36 bp, synthetic construct; identical to SEQ ID NO: 10841
  misc_feature 1..36: note = Synthetic oligonucleotide
  source 1..36: mol_type = other DNA

SEQ ID NO: 24729 - DNA, 32 bp, synthetic construct
  misc_feature 1..32: note = Synthetic oligonucleotide
  source 1..32: mol_type = other DNA
agtctgccccccccggtttctgaatcaaggca

SEQ ID NO: 24730 - DNA, 36 bp, synthetic construct; identical to SEQ ID NO: 10843
  misc_feature 1..36: note = Synthetic oligonucleotide
  source 1..36: mol_type = other DNA

SEQ ID NO: 24731 - DNA, 36 bp, synthetic construct
  misc_feature 1..36: note = Synthetic oligonucleotide
  source 1..36: mol_type = other DNA
agtctgctctacccaagagtggaatcaaggcaaagc

SEQ ID NO: 24732 - DNA, 36 bp, synthetic construct
  misc_feature 1..36: note = Synthetic oligonucleotide
  source 1..36: mol_type = other DNA
agtctgcttcagccagatttggaatcaaggcaaagc

SEQ ID NO: 24733 - DNA, 36 bp, synthetic construct
  misc_feature 1..36: note = Synthetic oligonucleotide
  source 1..36: mol_type = other DNA
agtctggagaccctggctttggaatcaaggcaaagc

SEQ ID NO: 24734 - DNA, 36 bp, synthetic construct
  misc_feature 1..36: note = Synthetic oligonucleotide
  source 1..36: mol_type = other DNA
agtctggatgccccggaattggaatcaaggcaaagc

SEQ ID NO: 24735 - DNA, 37 bp, synthetic construct
  misc_feature 1..37: note = Synthetic oligonucleotide
  source 1..37: mol_type = other DNA
agtcttattctagcaaaaaatcatatggtaacaaaac

SEQ ID NO: 24736 - DNA, 36 bp, synthetic construct
  misc_feature 1..36: note = Synthetic oligonucleotide
  source 1..36: mol_type = other DNA
agtgtaacaaattctcaaagaacatcaaatcgcaac

SEQ ID NO: 24737 - DNA, 36 bp, synthetic construct; identical to SEQ ID NO: 10857
  misc_feature 1..36: note = Synthetic oligonucleotide
  source 1..36: mol_type = other DNA

SEQ ID NO: 24738 - DNA, 36 bp, synthetic construct
  misc_feature 1..36: note = Synthetic oligonucleotide
  source 1..36: mol_type = other DNA
agtgtaaccaaccaaggtctatctgcaaatcacaac

SEQ ID NO: 24739 - DNA, 36 bp, synthetic construct
  misc_feature 1..36: note = Synthetic oligonucleotide
  source 1..36: mol_type = other DNA
agtgtaaccaaccccggcccgcgaccaatccgcaac

SEQ ID NO: 24740 - DNA, 36 bp, synthetic construct
  misc_feature 1..36: note = Synthetic oligonucleotide
  source 1..36: mol_type = other DNA
agtgtaaccaaccctgacctgagagcagtccgcaac

SEQ ID NO: 24741 - DNA, 36 bp, synthetic construct
  misc_feature 1..36: note = Synthetic oligonucleotide
  source 1..36: mol_type = other DNA
agtgtaaccaacctcagcccgggttcaatccgcaac

SEQ ID NO: 24742 - DNA, 36 bp, synthetic construct; identical to SEQ ID NO: 24741
  misc_feature 1..36: note = Synthetic oligonucleotide
  source 1..36: mol_type = other DNA

SEQ ID NO: 24743 - DNA, 36 bp, synthetic construct; identical to SEQ ID NO: 24741
  misc_feature 1..36: note = Synthetic oligonucleotide
  source 1..36: mol_type = other DNA

SEQ ID NO: 24744 - DNA, 36 bp, synthetic construct; identical to SEQ ID NO: 10864
  misc_feature 1..36: note = Synthetic oligonucleotide
  source 1..36: mol_type = other DNA

SEQ ID NO: 24745 - DNA, 36 bp, synthetic construct
  misc_feature 1..36: note = Synthetic oligonucleotide
  source 1..36: mol_type = other DNA
agtgtaaccaatcccagtctgctgtcaatccacaac

SEQ ID NO: 24746 - DNA, 36 bp, synthetic construct
  misc_feature 1..36: note = Synthetic oligonucleotide
  source 1..36: mol_type = other DNA
agtgtaaccaatcccggcccgcgagcaatccgcaac

SEQ ID NO: 24747 - DNA, 36 bp, synthetic construct; identical to SEQ ID NO: 10867
  misc_feature 1..36: note = Synthetic oligonucleotide
  source 1..36: mol_type = other DNA

SEQ ID NO: 24748 - DNA, 36 bp, synthetic construct
  misc_feature 1..36: note = Synthetic oligonucleotide
  source 1..36: mol_type = other DNA
agtgtaaccaatcccggcctgcgaccaatccgcaac

SEQ ID NO: 24749 - DNA, 36 bp, synthetic construct
  misc_feature 1..36: note = Synthetic oligonucleotide
  source 1..36: mol_type = other DNA
agtgtaaccaatctccgcccgccgccaatccgcaac

SEQ ID NO: 24750 - DNA, 36 bp, synthetic construct
  misc_feature 1..36: note = Synthetic oligonucleotide
  source 1..36: mol_type = other DNA
agtgtaaccaatctccgcctgccgccaatccgcaac

SEQ ID NO: 24751 - DNA, 36 bp, synthetic construct
  misc_feature 1..36: note = Synthetic oligonucleotide
  source 1..36: mol_type = other DNA
agtgtaaccaatcttagcctgcgatcaatccgcaac

SEQ ID NO: 24752 - DNA, 36 bp, synthetic construct; identical to SEQ ID NO: 10869
  misc_feature 1..36: note = Synthetic oligonucleotide
  source 1..36: mol_type = other DNA

SEQ ID NO: 24753 - DNA, 36 bp, synthetic construct; identical to SEQ ID NO: 10869
  misc_feature 1..36: note = Synthetic oligonucleotide
  source 1..36: mol_type = other DNA

SEQ ID NO: 24754 - DNA, 36 bp, synthetic construct; identical to SEQ ID NO: 10869
  misc_feature 1..36: note = Synthetic oligonucleotide
  source 1..36: mol_type = other DNA

SEQ ID NO: 24755 - DNA, 36 bp, synthetic construct; identical to SEQ ID NO: 10869
  misc_feature 1..36: note = Synthetic oligonucleotide
  source 1..36: mol_type = other DNA

SEQ ID NO: 24756 - DNA, 36 bp, synthetic construct; identical to SEQ ID NO: 10869
  misc_feature 1..36: note = Synthetic oligonucleotide
  source 1..36: mol_type = other DNA

SEQ ID NO: 24757 - DNA, 36 bp, synthetic construct; identical to SEQ ID NO: 10869
  misc_feature 1..36: note = Synthetic oligonucleotide
  source 1..36: mol_type = other DNA

SEQ ID NO: 24758 - DNA, 36 bp, synthetic construct
  misc_feature 1..36: note = Synthetic oligonucleotide
  source 1..36: mol_type = other DNA
agtgtaacccatctcagcccgcgaccaatccgcaac

SEQ ID NO: 24759 - DNA, 36 bp, synthetic construct
  misc_feature 1..36: note = Synthetic oligonucleotide
  source 1..36: mol_type = other DNA
agtgtaaccgaccccgacccgagagcaatccgcaac

SEQ ID NO: 24760 - DNA, 36 bp, synthetic construct
  misc_feature 1..36: note = Synthetic oligonucleotide
  source 1..36: mol_type = other DNA
agtgtaaccgaccccggcctgggagcaatccgcaac

SEQ ID NO: 24761 - DNA, 36 bp, synthetic construct; identical to SEQ ID NO: 10876
  misc_feature 1..36: note = Synthetic oligonucleotide
  source 1..36: mol_type = other DNA

SEQ ID NO: 24762 - DNA, 36 bp, synthetic construct; identical to SEQ ID NO: 10876
  misc_feature 1..36: note = Synthetic oligonucleotide
  source 1..36: mol_type = other DNA

SEQ ID NO: 24763 - DNA, 36 bp, synthetic construct; identical to SEQ ID NO: 10877
  misc_feature 1..36: note = Synthetic oligonucleotide
  source 1..36: mol_type = other DNA

SEQ ID NO: 24764 - DNA, 36 bp, synthetic construct; identical to SEQ ID NO: 10877
  misc_feature 1..36: note = Synthetic oligonucleotide
  source 1..36: mol_type = other DNA

SEQ ID NO: 24765 - DNA, 36 bp, synthetic construct; identical to SEQ ID NO: 10877
  misc_feature 1..36: note = Synthetic oligonucleotide
  source 1..36: mol_type = other DNA

SEQ ID NO: 24766 - DNA, 36 bp, synthetic construct; identical to SEQ ID NO: 10878
  misc_feature 1..36: note = Synthetic oligonucleotide
  source 1..36: mol_type = other DNA

SEQ ID NO: 24767 - DNA, 36 bp, synthetic construct; identical to SEQ ID NO: 10878
  misc_feature 1..36: note = Synthetic oligonucleotide
  source 1..36: mol_type = other DNA

SEQ ID NO: 24768 - DNA, 36 bp, synthetic construct; identical to SEQ ID NO: 10878
  misc_feature 1..36: note = Synthetic oligonucleotide
  source 1..36: mol_type = other DNA

SEQ ID NO: 24769 - DNA, 36 bp, synthetic construct; identical to SEQ ID NO: 10878
  misc_feature 1..36: note = Synthetic oligonucleotide
  source 1..36: mol_type = other DNA

SEQ ID NO: 24770 - DNA, 36 bp, synthetic construct; identical to SEQ ID NO: 10878
  misc_feature 1..36: note = Synthetic oligonucleotide
  source 1..36: mol_type = other DNA

SEQ ID NO: 24771 - DNA, 36 bp, synthetic construct; identical to SEQ ID NO: 10878
  misc_feature 1..36: note = Synthetic oligonucleotide
  source 1..36: mol_type = other DNA

SEQ ID NO: 24772 - DNA, 36 bp, synthetic construct
  misc_feature 1..36: note = Synthetic oligonucleotide
  source 1..36: mol_type = other DNA
agtgtaaccgactaaggtctatctgcaatccacaac

SEQ ID NO: 24773 - DNA, 36 bp, synthetic construct
  misc_feature 1..36: note = Synthetic oligonucleotide
  source 1..36: mol_type = other DNA
agtgtaaccgactaaggtttatccgcaaatcacaac

SEQ ID NO: 24774 - DNA, 36 bp, synthetic construct; identical to SEQ ID NO: 24773
  misc_feature 1..36: note = Synthetic oligonucleotide
  source 1..36: mol_type = other DNA

SEQ ID NO: 24775 - DNA, 36 bp, synthetic construct
  misc_feature 1..36: note = Synthetic oligonucleotide
  source 1..36: mol_type = other DNA
agtgtaaccgactaaggtttatctgcaaatcacaac

SEQ ID NO: 24776 - DNA, 36 bp, synthetic construct; identical to SEQ ID NO: 24775
  misc_feature 1..36: note = Synthetic oligonucleotide
  source 1..36: mol_type = other DNA

SEQ ID NO: 24777 - DNA, 36 bp, synthetic construct
  misc_feature 1..36: note = Synthetic oligonucleotide
  source 1..36: mol_type = other DNA
agtgtaaccgatcccagcccgtaagcaatccgcaac

SEQ ID NO: 24778 - DNA, 36 bp, synthetic construct
  misc_feature 1..36: note = Synthetic oligonucleotide
  source 1..36: mol_type = other DNA
agtgtaaccgatcccagcctgcgagcaagccgcaac

SEQ ID NO: 24779 - DNA, 36 bp, synthetic construct
  misc_feature 1..36: note = Synthetic oligonucleotide
  source 1..36: mol_type = other DNA
agtgtaaccgatcccgaccttcaagcaatccgcaac

SEQ ID NO: 24780 - DNA, 36 bp, synthetic construct; identical to SEQ ID NO: 10885
  misc_feature 1..36: note = Synthetic oligonucleotide
  source 1..36: mol_type = other DNA

SEQ ID NO: 24781 - DNA, 36 bp, synthetic construct
  misc_feature 1..36: note = Synthetic oligonucleotide
  source 1..36: mol_type = other DNA
agtgtaaccgatccgagtccgaaagcaatccgcaac

SEQ ID NO: 24782 - DNA, 36 bp, synthetic construct
  misc_feature 1..36: note = Synthetic oligonucleotide
  source 1..36: mol_type = other DNA
agtgtaacggatcagagcccgggagcgattcacaac

SEQ ID NO: 24783 - DNA, 37 bp, synthetic construct; identical to SEQ ID NO: 10886
  misc_feature 1..37: note = Synthetic oligonucleotide
  source 1..37: mol_type = other DNA

SEQ ID NO: 24784 - DNA, 36 bp, synthetic construct; identical to SEQ ID NO: 10887
  misc_feature 1..36: note = Synthetic oligonucleotide
  source 1..36: mol_type = other DNA

SEQ ID NO: 24785 - DNA, 37 bp, synthetic construct
  misc_feature 1..37: note = Synthetic oligonucleotide
  source 1..37: mol_type = other DNA
agtgtaactgaccgctgccggggatcaaaccacaacc

SEQ ID NO: 24786 - DNA, 36 bp, synthetic construct
  misc_feature 1..36: note = Synthetic oligonucleotide
  source 1..36: mol_type = other DNA
agtgtaactgactgatgcctgtgaggcattcacaac

SEQ ID NO: 24787 - DNA, 36 bp, synthetic construct
  misc_feature 1..36: note = Synthetic oligonucleotide
  source 1..36: mol_type = other DNA
agtgtaactgagcgaccccttcgatcaaaccacggc

SEQ ID NO: 24788 - DNA, 36 bp, synthetic construct
  misc_feature 1..36: note = Synthetic oligonucleotide
  source 1..36: mol_type = other DNA
agtgtaactgagcgagcgctctcttccggccacagc

SEQ ID NO: 24789 - DNA, 36 bp, synthetic construct
  misc_feature 1..36: note = Synthetic oligonucleotide
  source 1..36: mol_type = other DNA
agtgtaactgagcgggcgctctcttccggccacagc

SEQ ID NO: 24790 - DNA, 25 bp, synthetic construct
  misc_feature 1..25: note = Synthetic oligonucleotide
  source 1..25: mol_type = other DNA
agtgtaactgatcagagtccgttgg

SEQ ID NO: 24791 - DNA, 36 bp, synthetic construct
  misc_feature 1..36: note = Synthetic oligonucleotide
  source 1..36: mol_type = other DNA
agtgtaatcaacccaagcccgtaagcaatccgcaac

SEQ ID NO: 24792 - DNA, 36 bp, synthetic construct
  misc_feature 1..36: note = Synthetic oligonucleotide
  source 1..36: mol_type = other DNA
agtgtaatcaacccaagcccgtcagcaagccgcaac

SEQ ID NO: 24793 - DNA, 36 bp, synthetic construct
  misc_feature 1..36: note = Synthetic oligonucleotide
  source 1..36: mol_type = other DNA
agtgtaatcaaccccggcctgaaagcaagtcgcaac

SEQ ID NO: 24794 - DNA, 36 bp, synthetic construct
  misc_feature 1..36: note = Synthetic oligonucleotide
  source 1..36: mol_type = other DNA
agtgtaatcgaacggcctcccccatcaaaccacggc

SEQ ID NO: 24795 - DNA, 36 bp, synthetic construct
  misc_feature 1..36: note = Synthetic oligonucleotide
  source 1..36: mol_type = other DNA
agtgtaatcgaccccagcctgaaagcaatccgcaac

SEQ ID NO: 24796 - DNA, 36 bp, synthetic construct
  misc_feature 1..36: note = Synthetic oligonucleotide
  source 1..36: mol_type = other DNA
agtgtaatcgaccccagcctgcgatcaatccgcaac

SEQ ID NO: 24797 - DNA, 36 bp, synthetic construct; identical to SEQ ID NO: 24796
  misc_feature 1..36: note = Synthetic oligonucleotide
  source 1..36: mol_type = other DNA

SEQ ID NO: 24798 - DNA, 36 bp, synthetic construct
  misc_feature 1..36: note = Synthetic oligonucleotide
  source 1..36: mol_type = other DNA
agtgtaatcgaccccgacctgcgagcaagccgcaac

SEQ ID NO: 24799 - DNA, 36 bp, synthetic construct
  misc_feature 1..36: note = Synthetic oligonucleotide
  source 1..36: mol_type = other DNA
agtgtaatcgaccccggcccgagagcaatccgcaac

SEQ ID NO: 24800 - DNA, 36 bp, synthetic construct
  misc_feature 1..36: note = Synthetic oligonucleotide
  source 1..36: mol_type = other DNA
agtgtaatcgaccccggcctgcgagcaatccgcaac

SEQ ID NO: 24801 - DNA, 36 bp, synthetic construct
  misc_feature 1..36: note = Synthetic oligonucleotide
  source 1..36: mol_type = other DNA
agtgtaatcgaccccggcctgtgtgcaatccgcaac

SEQ ID NO: 24802 - DNA, 36 bp, synthetic construct
  misc_feature 1..36: note = Synthetic oligonucleotide
  source 1..36: mol_type = other DNA
agtgtaatcgacctcagcctgcgagcaagccgcaac

SEQ ID NO: 24803 - DNA, 33 bp, synthetic construct
  misc_feature 1..33: note = Synthetic oligonucleotide
  source 1..33: mol_type = other DNA
agtgtaatcgacctcggcctgcgagcaagccgc

SEQ ID NO: 24804 - DNA, 36 bp, synthetic construct
  misc_feature 1..36: note = Synthetic oligonucleotide
  source 1..36: mol_type = other DNA
agtgtaatcgagcggccctcccgagcagaccacggc

SEQ ID NO: 24805 - DNA, 36 bp, synthetic construct
  misc_feature 1..36: note = Synthetic oligonucleotide
  source 1..36: mol_type = other DNA
agtgtaatcgagcggcctctccccgcagaccacggc

SEQ ID NO: 24806 - DNA, 37 bp, synthetic construct
  misc_feature 1..37: note = Synthetic oligonucleotide
  source 1..37: mol_type = other DNA
agtgtaatcgagcggccttccccctcaaaccacggcg

SEQ ID NO: 24807 - DNA, 36 bp, synthetic construct
  misc_feature 1..36: note = Synthetic oligonucleotide
  source 1..36: mol_type = other DNA
agtgtaatcgatccccgcccgcgagcaacccgcaac

SEQ ID NO: 24808 - DNA, 36 bp, synthetic construct
  misc_feature 1..36: note = Synthetic oligonucleotide
  source 1..36: mol_type = other DNA
agtgtaatcgatcccggcccgcgagcaacgcgcaac

SEQ ID NO: 24809 - DNA, 36 bp, synthetic construct
  misc_feature 1..36: note = Synthetic oligonucleotide
  source 1..36: mol_type = other DNA
agtgtaatcgatcccggcccgcgagcaagccgcaac

SEQ ID NO: 24810 - DNA, 36 bp, synthetic construct
  misc_feature 1..36: note = Synthetic oligonucleotide
  source 1..36: mol_type = other DNA
agtgtaatcgatcggggcccgtgggccggtcacaac

SEQ ID NO: 24811 - DNA, 37 bp, synthetic construct
  misc_feature 1..37: note = Synthetic oligonucleotide
  source 1..37: mol_type = other DNA
agtgtaatcgatctcagcccgagagcagcccgcaact

SEQ ID NO: 24812 - DNA, 36 bp, synthetic construct
  misc_feature 1..36: note = Synthetic oligonucleotide
  source 1..36: mol_type = other DNA
agtgtaattgttcaaaattcgtggtcaagccgcaac

SEQ ID NO: 24813 - DNA, 38 bp, synthetic construct
  misc_feature 1..38: note = Synthetic oligonucleotide
  source 1..38: mol_type = other DNA
agtgtaattgttcaaaattcgtggtcaagccgcaactg

SEQ ID NO: 24814 - DNA, 36 bp, synthetic construct; identical to SEQ ID NO: 10908
  misc_feature 1..36: note = Synthetic oligonucleotide
  source 1..36: mol_type = other DNA

SEQ ID NO: 24815 - DNA, 36 bp, synthetic construct; identical to SEQ ID NO: 10908
  misc_feature 1..36: note = Synthetic oligonucleotide
  source 1..36: mol_type = other DNA

SEQ ID NO: 24816 - DNA, 20 bp, synthetic construct
  misc_feature 1..20: note = Synthetic oligonucleotide
  source 1..20: mol_type = other DNA
agtgtacccgaccaagggct

SEQ ID NO: 24817 - DNA, 36 bp, synthetic construct
  misc_feature 1..36: note = Synthetic oligonucleotide
  source 1..36: mol_type = other DNA
agtgtacccgaccaagggctatctgcaattcacaac

SEQ ID NO: 24818 - DNA, 36 bp, synthetic construct; identical to SEQ ID NO: 24817
  misc_feature 1..36: note = Synthetic oligonucleotide
  source 1..36: mol_type = other DNA

SEQ ID NO: 24819 - DNA, 36 bp, synthetic construct; identical to SEQ ID NO: 24817
  misc_feature 1..36: note = Synthetic oligonucleotide
  source 1..36: mol_type = other DNA

SEQ ID NO: 24820 - DNA, 36 bp, synthetic construct
  misc_feature 1..36: note = Synthetic oligonucleotide
  source 1..36: mol_type = other DNA
agtgtacctaagcggtgattatcagtcaattacagc

SEQ ID NO: 24821 - DNA, 36 bp, synthetic construct; identical to SEQ ID NO: 10916
  misc_feature 1..36: note = Synthetic oligonucleotide
  source 1..36: mol_type = other DNA

SEQ ID NO: 24822 - DNA, 36 bp, synthetic construct; identical to SEQ ID NO: 10918
  misc_feature 1..36: note = Synthetic oligonucleotide
  source 1..36: mol_type = other DNA

SEQ ID NO: 24823 - DNA, 36 bp, synthetic construct
  misc_feature 1..36: note = Synthetic oligonucleotide
  source 1..36: mol_type = other DNA
agtgtacctgagccgcgattctcgaccatctccagc

SEQ ID NO: 24824 - DNA, 36 bp, synthetic construct
  misc_feature 1..36: note = Synthetic oligonucleotide
  source 1..36: mol_type = other DNA
agtgtacctgagcgacgcttcgcgccggaccacggc

SEQ ID NO: 24825 - DNA, 36 bp, synthetic construct
  misc_feature 1..36: note = Synthetic oligonucleotide
  source 1..36: mol_type = other DNA
agtgtacctgagcgacggctacccgcaggccacagc

SEQ ID NO: 24826 - DNA, 36 bp, synthetic construct
  misc_feature 1..36: note = Synthetic oligonucleotide
  source 1..36: mol_type = other DNA
agtgtacctgagcggcgattctcgtcaagccccagc

SEQ ID NO: 24827 - DNA, 36 bp, synthetic construct
  misc_feature 1..36: note = Synthetic oligonucleotide
  source 1..36: mol_type = other DNA
agtgtacctgagcggcgattcttgtcaagccacagc

SEQ ID NO: 24828 - DNA, 36 bp, synthetic construct; identical to SEQ ID NO: 10927
  misc_feature 1..36: note = Synthetic oligonucleotide
  source 1..36: mol_type = other DNA

SEQ ID NO: 24829 - DNA, 36 bp, synthetic construct; identical to SEQ ID NO: 10929
  misc_feature 1..36: note = Synthetic oligonucleotide
  source 1..36: mol_type = other DNA

SEQ ID NO: 24830 - DNA, 36 bp, synthetic construct; identical to SEQ ID NO: 10930
  misc_feature 1..36: note = Synthetic oligonucleotide
  source 1..36: mol_type = other DNA

SEQ ID NO: 24831 - DNA, 36 bp, synthetic construct; identical to SEQ ID NO: 10930
  misc_feature 1..36: note = Synthetic oligonucleotide
  source 1..36: mol_type = other DNA

SEQ ID NO: 24832 - DNA, 36 bp, synthetic construct; identical to SEQ ID NO: 10930
  misc_feature 1..36: note = Synthetic oligonucleotide
  source 1..36: mol_type = other DNA

SEQ ID NO: 24833 - DNA, 36 bp, synthetic construct; identical to SEQ ID NO: 10930
  misc_feature 1..36: note = Synthetic oligonucleotide
  source 1..36: mol_type = other DNA

SEQ ID NO: 24834 - DNA, 36 bp, synthetic construct; identical to SEQ ID NO: 10930
  misc_feature 1..36: note = Synthetic oligonucleotide
  source 1..36: mol_type = other DNA

SEQ ID NO: 24835 - DNA, 36 bp, synthetic construct
  misc_feature 1..36: note = Synthetic oligonucleotide
  source 1..36: mol_type = other DNA
agtgtacgtgagcggtgattcctggccatccccagc

SEQ ID NO: 24836 - DNA, 36 bp, synthetic construct
  misc_feature 1..36: note = Synthetic oligonucleotide
  source 1..36: mol_type = other DNA
agtgtactagaacggcccttcgcggcagaccacggc

SEQ ID NO: 24837 - DNA, 36 bp, synthetic construct; identical to SEQ ID NO: 24836
  misc_feature 1..36: note = Synthetic oligonucleotide
  source 1..36: mol_type = other DNA

SEQ ID NO: 24838 - DNA, 36 bp, synthetic construct
  misc_feature 1..36: note = Synthetic oligonucleotide
  source 1..36: mol_type = other DNA
agtgtactcaggagacgattgccggccgaccccaac

SEQ ID NO: 24839 - DNA, 36 bp, synthetic construct; identical to SEQ ID NO: 10931
  misc_feature 1..36: note = Synthetic oligonucleotide
  source 1..36: mol_type = other DNA

SEQ ID NO: 24840 - DNA, 36 bp, synthetic construct; identical to SEQ ID NO: 10935
  misc_feature 1..36: note = Synthetic oligonucleotide
  source 1..36: mol_type = other DNA

SEQ ID NO: 24841 - DNA, 36 bp, synthetic construct
  misc_feature 1..36: note = Synthetic oligonucleotide
  source 1..36: mol_type = other DNA
agtgtacttgaacctgaaaaggcgtcctgccccgac

SEQ ID NO: 24842 - DNA, 36 bp, synthetic construct
  misc_feature 1..36: note = Synthetic oligonucleotide
  source 1..36: mol_type = other DNA
agtgtacttgagcgacgagtcccatcaaaccacagc

SEQ ID NO: 24843 - DNA, 36 bp, synthetic construct
  misc_feature 1..36: note = Synthetic oligonucleotide
  source 1..36: mol_type = other DNA
agtgtacttgagcgacgattcccgaccatccccagc

SEQ ID NO: 24844 - DNA, 36 bp, synthetic construct
  misc_feature 1..36: note = Synthetic oligonucleotide
  source 1..36: mol_type = other DNA
agtgtacttgagcgacgattcccggccatccccagc

SEQ ID NO: 24845 - DNA, 36 bp, synthetic construct; identical to SEQ ID NO: 24844
  misc_feature 1..36: note = Synthetic oligonucleotide
  source 1..36: mol_type = other DNA

SEQ ID NO: 24846 - DNA, 36 bp, synthetic construct; identical to SEQ ID NO: 10938
  misc_feature 1..36: note = Synthetic oligonucleotide
  source 1..36: mol_type = other DNA

SEQ ID NO: 24847 - DNA, 36 bp, synthetic construct; identical to SEQ ID NO: 10941
  misc_feature 1..36: note = Synthetic oligonucleotide
  source 1..36: mol_type = other DNA

SEQ ID NO: 24848 - DNA, 36 bp, synthetic construct; identical to SEQ ID NO: 10941
  misc_feature 1..36: note = Synthetic oligonucleotide
  source 1..36: mol_type = other DNA

SEQ ID NO: 24849 - DNA, 36 bp, synthetic construct; identical to SEQ ID NO: 10941
  misc_feature 1..36: note = Synthetic oligonucleotide
  source 1..36: mol_type = other DNA

SEQ ID NO: 24850 - DNA, 36 bp, synthetic construct
  misc_feature 1..36: note = Synthetic oligonucleotide
  source 1..36: mol_type = other DNA
agtgtacttgagcggcgactctcggccaaccccagc

SEQ ID NO: 24851 - DNA, 36 bp, synthetic construct; identical to SEQ ID NO: 10943
  misc_feature 1..36: note = Synthetic oligonucleotide
  source 1..36: mol_type = other DNA

SEQ ID NO: 24852 - DNA, 36 bp, synthetic construct
  misc_feature 1..36: note = Synthetic oligonucleotide
  source 1..36: mol_type = other DNA
agtgtacttgagcggcgattcccggccatccctagc

SEQ ID NO: 24853 - DNA, 36 bp, synthetic construct; identical to SEQ ID NO: 24852
  misc_feature 1..36: note = Synthetic oligonucleotide
  source 1..36: mol_type = other DNA

SEQ ID NO: 24854 - DNA, 36 bp, synthetic construct
  misc_feature 1..36: note = Synthetic oligonucleotide
  source 1..36: mol_type = other DNA
agtgtacttgagcgggcgctctcggcgggccacagc

SEQ ID NO: 24855 - DNA, 34 bp, synthetic construct
  misc_feature 1..34: note = Synthetic oligonucleotide
  source 1..34: mol_type = other DNA
agtgtacttgagcggtgaatcccggccatcccca

SEQ ID NO: 24856 - DNA, 36 bp, synthetic construct; identical to SEQ ID NO: 10944
  misc_feature 1..36: note = Synthetic oligonucleotide
  source 1..36: mol_type = other DNA

SEQ ID NO: 24857 - DNA, 36 bp, synthetic construct; identical to SEQ ID NO: 10944
  misc_feature 1..36: note = Synthetic oligonucleotide
  source 1..36: mol_type = other DNA

SEQ ID NO: 24858 - DNA, 36 bp, synthetic construct; identical to SEQ ID NO: 10944
  misc_feature 1..36: note = Synthetic oligonucleotide
  source 1..36: mol_type = other DNA

SEQ ID NO: 24859 - DNA, 36 bp, synthetic construct; identical to SEQ ID NO: 10944
  misc_feature 1..36: note = Synthetic oligonucleotide
  source 1..36: mol_type = other DNA

SEQ ID NO: 24860 - DNA, 36 bp, synthetic construct; identical to SEQ ID NO: 10945
  misc_feature 1..36: note = Synthetic oligonucleotide
  source 1..36: mol_type = other DNA

SEQ ID NO: 24861 - DNA, 36 bp, synthetic construct; identical to SEQ ID NO: 10945
  misc_feature 1..36: note = Synthetic oligonucleotide
  source 1..36: mol_type = other DNA

SEQ ID NO: 24862 - DNA, 36 bp, synthetic construct; identical to SEQ ID NO: 10945
  misc_feature 1..36: note = Synthetic oligonucleotide
  source 1..36: mol_type = other DNA

SEQ ID NO: 24863 - DNA, 36 bp, synthetic construct; identical to SEQ ID NO: 10945
  misc_feature 1..36: note = Synthetic oligonucleotide
  source 1..36: mol_type = other DNA

SEQ ID NO: 24864 - DNA, 36 bp, synthetic construct; identical to SEQ ID NO: 10945
  misc_feature 1..36: note = Synthetic oligonucleotide
  source 1..36: mol_type = other DNA

SEQ ID NO: 24865 - DNA, 36 bp, synthetic construct; identical to SEQ ID NO: 10945
  misc_feature 1..36: note = Synthetic oligonucleotide
  source 1..36: mol_type = other DNA

SEQ ID NO: 24866 - DNA, 36 bp, synthetic construct; identical to SEQ ID NO: 10945
  misc_feature 1..36: note = Synthetic oligonucleotide
  source 1..36: mol_type = other DNA

SEQ ID NO: 24867 - DNA, 36 bp, synthetic construct; identical to SEQ ID NO: 10946
  misc_feature 1..36: note = Synthetic oligonucleotide
  source 1..36: mol_type = other DNA

SEQ ID NO: 24868 - DNA, 36 bp, synthetic construct
  misc_feature 1..36: note = Synthetic oligonucleotide
  source 1..36: mol_type = other DNA
agtgtacttgagcggtgattctcggccatccccagc

SEQ ID NO: 24869 - DNA, 36 bp, synthetic construct; identical to SEQ ID NO: 10947
  misc_feature 1..36: note = Synthetic oligonucleotide
  source 1..36: mol_type = other DNA

SEQ ID NO: 24870 - DNA, 36 bp, synthetic construct; identical to SEQ ID NO: 10949
  misc_feature 1..36: note = Synthetic oligonucleotide
  source 1..36: mol_type = other DNA

SEQ ID NO: 24871 - DNA, 36 bp, synthetic construct
  misc_feature 1..36: note = Synthetic oligonucleotide
  source 1..36: mol_type = other DNA
agtgtagcaaagcgagaggcggccgcaatccgcagc

SEQ ID NO: 24872 - DNA, 36 bp, synthetic construct
  misc_feature 1..36: note = Synthetic oligonucleotide
  source 1..36: mol_type = other DNA
agtgtagcaaatcgagaaacgacctcagtccgtagc

SEQ ID NO: 24873 - DNA, 36 bp, synthetic construct; identical to SEQ ID NO: 10953
  misc_feature 1..36: note = Synthetic oligonucleotide
  source 1..36: mol_type = other DNA

SEQ ID NO: 24874 - DNA, 36 bp, synthetic construct
  misc_feature 1..36: note = Synthetic oligonucleotide
  source 1..36: mol_type = other DNA
agtgtagcaaatcgagagccggccgcaatccgcagc

SEQ ID NO: 24875 - DNA, 36 bp, synthetic construct
  misc_feature 1..36: note = Synthetic oligonucleotide
  source 1..36: mol_type = other DNA
agtgtagcaaatcgatagacgggcgcaatccgcagc

SEQ ID NO: 24876 - DNA, 36 bp, synthetic construct
  misc_feature 1..36: note = Synthetic oligonucleotide
  source 1..36: mol_type = other DNA
agtgtagcaaatctgaaattgcgctcaagccggaac

SEQ ID NO: 24877 - DNA, 36 bp, synthetic construct
  misc_feature 1..36: note = Synthetic oligonucleotide
  source 1..36: mol_type = other DNA
agtgtagcaaattgagaaacgaccgcgatccgcagc

SEQ ID NO: 24878 - DNA, 36 bp, synthetic construct; identical to SEQ ID NO: 24877
  misc_feature 1..36: note = Synthetic oligonucleotide
  source 1..36: mol_type = other DNA

SEQ ID NO: 24879 - DNA, 36 bp, synthetic construct; identical to SEQ ID NO: 10956
  misc_feature 1..36: note = Synthetic oligonucleotide
  source 1..36: mol_type = other DNA

SEQ ID NO: 24880 - DNA, 36 bp, synthetic construct
  misc_feature 1..36: note = Synthetic oligonucleotide
  source 1..36: mol_type = other DNA
agtgtagcagggaggagttcgcggtcaatccacaac

SEQ ID NO: 24881 - DNA, 36 bp, synthetic construct
  misc_feature 1..36: note = Synthetic oligonucleotide
  source 1..36: mol_type = other DNA
agtgtagcggttcaaaaatcggggtccagccgcaac

SEQ ID NO: 24882 - DNA, 36 bp, synthetic construct
  misc_feature 1..36: note = Synthetic oligonucleotide
  source 1..36: mol_type = other DNA
agtgtagctaatcgatgtctgctcgggattcacaac

SEQ ID NO: 24883 - DNA, 36 bp, synthetic construct
  misc_feature 1..36: note = Synthetic oligonucleotide
  source 1..36: mol_type = other DNA
agtgtagctattcagaaaatctggtcaatccgcaac

SEQ ID NO: 24884 - DNA, 36 bp, synthetic construct; identical to SEQ ID NO: 10970
  misc_feature 1..36: note = Synthetic oligonucleotide
  source 1..36: mol_type = other DNA

SEQ ID NO: 24885 - DNA, 36 bp, synthetic construct; identical to SEQ ID NO: 10971
  misc_feature 1..36: note = Synthetic oligonucleotide
  source 1..36: mol_type = other DNA

SEQ ID NO: 24886 - DNA, 36 bp, synthetic construct
  misc_feature 1..36: note = Synthetic oligonucleotide
  source 1..36: mol_type = other DNA
agtgtagctattcagaaattctggtcaacccgcaac

SEQ ID NO: 24887 - DNA, 36 bp, synthetic construct; identical to SEQ ID NO: 24886
  misc_feature 1..36: note = Synthetic oligonucleotide
  source 1..36: mol_type = other DNA

SEQ ID NO: 24888 - DNA, 36 bp, synthetic construct; identical to SEQ ID NO: 24886
  misc_feature 1..36: note = Synthetic oligonucleotide
  source 1..36: mol_type = other DNA

SEQ ID NO: 24889 - DNA, 36 bp, synthetic construct
  misc_feature 1..36: note = Synthetic oligonucleotide
  source 1..36: mol_type = other DNA
agtgtagctgactgggatctgtgcactggccggaac

SEQ ID NO: 24890 - DNA, 36 bp, synthetic construct
  misc_feature 1..36: note = Synthetic oligonucleotide
  source 1..36: mol_type = other DNA
agtgtagtgcatccggggtgagagagggagctacaa

SEQ ID NO: 24891 - DNA, 37 bp, synthetic construct
  misc_feature 1..37: note = Synthetic oligonucleotide
  source 1..37: mol_type = other DNA
agtgtagtgcatccggggtgagagagggagctacaac

SEQ ID NO: 24892 - DNA, 37 bp, synthetic construct; identical to SEQ ID NO: 10974
  misc_feature 1..37: note = Synthetic oligonucleotide
  source 1..37: mol_type = other DNA

SEQ ID NO: 24893 - DNA, 37 bp, synthetic construct; identical to SEQ ID NO: 10974
  misc_feature 1..37: note = Synthetic oligonucleotide
  source 1..37: mol_type = other DNA

SEQ ID NO: 24894 - DNA, 37 bp, synthetic construct; identical to SEQ ID NO: 10974
  misc_feature 1..37: note = Synthetic oligonucleotide
  source 1..37: mol_type = other DNA

SEQ ID NO: 24895 - DNA, 37 bp, synthetic construct; identical to SEQ ID NO: 10974
  misc_feature 1..37: note = Synthetic oligonucleotide
  source 1..37: mol_type = other DNA

SEQ ID NO: 24896 - DNA, 37 bp, synthetic construct; identical to SEQ ID NO: 10974
  misc_feature 1..37: note = Synthetic oligonucleotide
  source 1..37: mol_type = other DNA

SEQ ID NO: 24897 - DNA, 36 bp, synthetic construct; identical to SEQ ID NO: 10975
  misc_feature 1..36: note = Synthetic oligonucleotide
  source 1..36: mol_type = other DNA

SEQ ID NO: 24898 - DNA, 36 bp, synthetic construct; identical to SEQ ID NO: 10979
  misc_feature 1..36: note = Synthetic oligonucleotide
  source 1..36: mol_type = other DNA

SEQ ID NO: 24899 - DNA, 36 bp, synthetic construct
  misc_feature 1..36: note = Synthetic oligonucleotide
  source 1..36: mol_type = other DNA
agtgtatcaagccatcccctgcacgcaattcacaac

SEQ ID NO: 24900 - DNA, 36 bp, synthetic construct
  misc_feature 1..36: note = Synthetic oligonucleotide
  source 1..36: mol_type = other DNA
agtgtatcaaggcttggaatcccggccagctaaagc

SEQ ID NO: 24901 - DNA, 36 bp, synthetic construct
  misc_feature 1..36: note = Synthetic oligonucleotide
  source 1..36: mol_type = other DNA
agtgtatcagatgttccgctggtgaggtatcggaac

SEQ ID NO: 24902 - DNA, 36 bp, synthetic construct; identical to SEQ ID NO: 10986
  misc_feature 1..36: note = Synthetic oligonucleotide
  source 1..36: mol_type = other DNA

SEQ ID NO: 24903 - DNA, 36 bp, synthetic construct; identical to SEQ ID NO: 10986
  misc_feature 1..36: note = Synthetic oligonucleotide
  source 1..36: mol_type = other DNA

SEQ ID NO: 24904 - DNA, 36 bp, synthetic construct
  misc_feature 1..36: note = Synthetic oligonucleotide
  source 1..36: mol_type = other DNA
agtgtatccaagaggcgctccccgaccatccacagc

SEQ ID NO: 24905 - DNA, 36 bp, synthetic construct; identical to SEQ ID NO: 10988
  misc_feature 1..36: note = Synthetic oligonucleotide
  source 1..36: mol_type = other DNA

SEQ ID NO: 24906 - DNA, 36 bp, synthetic construct
  misc_feature 1..36: note = Synthetic oligonucleotide
  source 1..36: mol_type = other DNA
agtgtatccaagcggcgactcccggcaaaccccaac

SEQ ID NO: 24907 - DNA, 36 bp, synthetic construct; identical to SEQ ID NO: 10989
  misc_feature 1..36: note = Synthetic oligonucleotide
  source 1..36: mol_type = other DNA

SEQ ID NO: 24908 - DNA, 36 bp, synthetic construct
  misc_feature 1..36: note = Synthetic oligonucleotide
  source 1..36: mol_type = other DNA
agtgtatccgagcgacgattccccgcaaaccacagc

SEQ ID NO: 24909 - DNA, 36 bp, synthetic construct; identical to SEQ ID NO: 10991
  misc_feature 1..36: note = Synthetic oligonucleotide
  source 1..36: mol_type = other DNA

SEQ ID NO: 24910 - DNA, 36 bp, synthetic construct; identical to SEQ ID NO: 10991
  misc_feature 1..36: note = Synthetic oligonucleotide
  source 1..36: mol_type = other DNA

SEQ ID NO: 24911 - DNA, 36 bp, synthetic construct
  misc_feature 1..36: note = Synthetic oligonucleotide
  source 1..36: mol_type = other DNA
agtgtatccgagcgacgattccctgcaaaccacagc

SEQ ID NO: 24912 - DNA, 36 bp, synthetic construct; identical to SEQ ID NO: 24911
  misc_feature 1..36: note = Synthetic oligonucleotide
  source 1..36: mol_type = other DNA

SEQ ID NO: 24913 - DNA, 36 bp, synthetic construct; identical to SEQ ID NO: 10993
  misc_feature 1..36: note = Synthetic oligonucleotide
  source 1..36: mol_type = other DNA

SEQ ID NO: 24914 - DNA, 36 bp, synthetic construct; identical to SEQ ID NO: 10994
  misc_feature 1..36: note = Synthetic oligonucleotide
  source 1..36: mol_type = other DNA

SEQ ID NO: 24915 - DNA, 36 bp, synthetic construct; identical to SEQ ID NO: 10994
  misc_feature 1..36: note = Synthetic oligonucleotide
  source 1..36: mol_type = other DNA

SEQ ID NO: 24916 - DNA, 36 bp, synthetic construct
  misc_feature 1..36: note = Synthetic oligonucleotide
  source 1..36: mol_type = other DNA
agtgtatccgagcggcggttaccccctgaccacagc

SEQ ID NO: 24917 - DNA, 36 bp, synthetic construct
  misc_feature 1..36: note = Synthetic oligonucleotide
  source 1..36: mol_type = other DNA
agtgtatccgagcgtcgattccctgcaaaccccagc

SEQ ID NO: 24918 - DNA, 36 bp, synthetic construct; identical to SEQ ID NO: 24917
  misc_feature 1..36: note = Synthetic oligonucleotide
  source 1..36: mol_type = other DNA

SEQ ID NO: 24919 - DNA, 36 bp, synthetic construct; identical to SEQ ID NO: 24917
  misc_feature 1..36: note = Synthetic oligonucleotide
  source 1..36: mol_type = other DNA

SEQ ID NO: 24920 - DNA, 36 bp, synthetic construct
  misc_feature 1..36: note = Synthetic oligonucleotide
  source 1..36: mol_type = other DNA
agtgtatccgatcccagcctgcgagcaagccgcaac

SEQ ID NO: 24921 - DNA, 36 bp, synthetic construct; identical to SEQ ID NO: 10999
  misc_feature 1..36: note = Synthetic oligonucleotide
  source 1..36: mol_type = other DNA

SEQ ID NO: 24922 - DNA, 36 bp, synthetic construct
  misc_feature 1..36: note = Synthetic oligonucleotide
  source 1..36: mol_type = other DNA
agtgtatcgaagccgggactcccgacaggccatagc

SEQ ID NO: 24923 - DNA, 36 bp, synthetic construct; identical to SEQ ID NO: 11003
  misc_feature 1..36: note = Synthetic oligonucleotide
  source 1..36: mol_type = other DNA

SEQ ID NO: 24924 - DNA, 36 bp, synthetic construct; identical to SEQ ID NO: 11003
  misc_feature 1..36: note = Synthetic oligonucleotide
  source 1..36: mol_type = other DNA

SEQ ID NO: 24925 - DNA, 36 bp, synthetic construct; identical to SEQ ID NO: 11003
  misc_feature 1..36: note = Synthetic oligonucleotide
  source 1..36: mol_type = other DNA

SEQ ID NO: 24926 - DNA, 36 bp, synthetic construct; identical to SEQ ID NO: 11005
  misc_feature 1..36: note = Synthetic oligonucleotide
  source 1..36: mol_type = other DNA

SEQ ID NO: 24927 - DNA, 36 bp, synthetic construct; identical to SEQ ID NO: 11006
  misc_feature 1..36: note = Synthetic oligonucleotide
  source 1..36: mol_type = other DNA

SEQ ID NO: 24928 - DNA, 36 bp, synthetic construct
  misc_feature 1..36: note = Synthetic oligonucleotide
  source 1..36: mol_type = other DNA
agtgtatctcagcagcggctcccggcaaaccatagc

SEQ ID NO: 24929 - DNA, 36 bp, synthetic construct; identical to SEQ ID NO: 11008
  misc_feature 1..36: note = Synthetic oligonucleotide
  source 1..36: mol_type = other DNA

SEQ ID NO: 24930 - DNA, 34 bp, synthetic construct
  misc_feature 1..34: note = Synthetic oligonucleotide
  source 1..34: mol_type = other DNA
agtgtatctcagcggcgcttcccggcaaaccata

SEQ ID NO: 24931 - DNA, 36 bp, synthetic construct; identical to SEQ ID NO: 11009
  misc_feature 1..36: note = Synthetic oligonucleotide
  source 1..36: mol_type = other DNA

SEQ ID NO: 24932 - DNA, 36 bp, synthetic construct; identical to SEQ ID NO: 11009
  misc_feature 1..36: note = Synthetic oligonucleotide
  source 1..36: mol_type = other DNA

SEQ ID NO: 24933 - DNA, 36 bp, synthetic construct; identical to SEQ ID NO: 11009
  misc_feature 1..36: note = Synthetic oligonucleotide
  source 1..36: mol_type = other DNA

SEQ ID NO: 24934 - DNA, 36 bp, synthetic construct; identical to SEQ ID NO: 11009
  misc_feature 1..36: note = Synthetic oligonucleotide
  source 1..36: mol_type = other DNA

SEQ ID NO: 24935 - DNA, 37 bp, synthetic construct; identical to SEQ ID NO: 11010
  misc_feature 1..37: note = Synthetic oligonucleotide
  source 1..37: mol_type = other DNA

SEQ ID NO: 24936 - DNA, 36 bp, synthetic construct
  misc_feature 1..36: note = Synthetic oligonucleotide
  source 1..36: mol_type = other DNA
agtgtatctcagcggcggttcccggcaaaccatagc

SEQ ID NO: 24937 - DNA, 36 bp, synthetic construct; identical to SEQ ID NO: 11011
  misc_feature 1..36: note = Synthetic oligonucleotide
  source 1..36: mol_type = other DNA

SEQ ID NO: 24938 - DNA, 36 bp, synthetic construct; identical to SEQ ID NO: 11011
  misc_feature 1..36: note = Synthetic oligonucleotide
  source 1..36: mol_type = other DNA

SEQ ID NO: 24939 - DNA, 36 bp, synthetic construct; identical to SEQ ID NO: 11013
  misc_feature 1..36: note = Synthetic oligonucleotide
  source 1..36: mol_type = other DNA

SEQ ID NO: 24940 - DNA, 36 bp, synthetic construct
  misc_feature 1..36: note = Synthetic oligonucleotide
  source 1..36: mol_type = other DNA
agtgtatctgagcggcccttcccgcgaaaccacggc

SEQ ID NO: 24941 - DNA, 36 bp, synthetic construct
  misc_feature 1..36: note = Synthetic oligonucleotide
  source 1..36: mol_type = other DNA
agtgtatctgagcggcgattcccggtcaatcacagc

SEQ ID NO: 24942 - DNA, 36 bp, synthetic construct
  misc_feature 1..36: note = Synthetic oligonucleotide
  source 1..36: mol_type = other DNA
agtgtatctgagcggggcttatcggtcaatcacagc

SEQ ID NO: 24943 - DNA, 36 bp, synthetic construct
  misc_feature 1..36: note = Synthetic oligonucleotide
  source 1..36: mol_type = other DNA
agtgtatctgagcgtcggctcaccgcaggccacagc

SEQ ID NO: 24944 - DNA, 36 bp, synthetic construct; identical to SEQ ID NO: 11022
  misc_feature 1..36: note = Synthetic oligonucleotide
  source 1..36: mol_type = other DNA

SEQ ID NO: 24945 - DNA, 36 bp, synthetic construct; identical to SEQ ID NO: 11023
  misc_feature 1..36: note = Synthetic oligonucleotide
  source 1..36: mol_type = other DNA

SEQ ID NO: 24946 - DNA, 36 bp, synthetic construct
  misc_feature 1..36: note = Synthetic oligonucleotide
  source 1..36: mol_type = other DNA
agtgttcgtgagcggtgaatcccggccatccccagc

SEQ ID NO: 24947 - DNA, 24 bp, synthetic construct
  misc_feature 1..24: note = Synthetic oligonucleotide
  source 1..24: mol_type = other DNA
agttatcgcttggtatgatataat

SEQ ID NO: 24948 - DNA, 31 bp, synthetic construct
  misc_feature 1..31: note = Synthetic oligonucleotide
  source 1..31: mol_type = other DNA
agttccctaatagctcttggtatggtataat

SEQ ID NO: 24949 - DNA, 37 bp, synthetic construct
  misc_feature 1..37: note = Synthetic oligonucleotide
  source 1..37: mol_type = other DNA
agttccggctggtgcgcatatcccaatgctgtaaact

SEQ ID NO: 24950 - DNA, 37 bp, synthetic construct; identical to SEQ ID NO: 11031
  misc_feature 1..37: note = Synthetic oligonucleotide
  source 1..37: mol_type = other DNA

SEQ ID NO: 24951 - DNA, 37 bp, synthetic construct
  misc_feature 1..37: note = Synthetic oligonucleotide
  source 1..37: mol_type = other DNA
agttccggtcagagcgcatttcccaatcgtctagact

SEQ ID NO: 24952 - DNA, 37 bp, synthetic construct
  misc_feature 1..37: note = Synthetic oligonucleotide
  source 1..37: mol_type = other DNA
agttccggtcagtgcgcatatctcaatcaagtaaact

SEQ ID NO: 24953 - DNA, 37 bp, synthetic construct
  misc_feature 1..37: note = Synthetic oligonucleotide
  source 1..37: mol_type = other DNA
agttcttgaccttattgatttgaatactattcaagac

SEQ ID NO: 24954 - DNA, 37 bp, synthetic construct
  misc_feature 1..37: note = Synthetic oligonucleotide
  source 1..37: mol_type = other DNA
agttcttgaccttattgatttgactactattcaagac

SEQ ID NO: 24955 - DNA, 37 bp, synthetic construct
  misc_feature 1..37: note = Synthetic oligonucleotide
  source 1..37: mol_type = other DNA
agttgcggcttgctcgcaggccaggatcgattacact

SEQ ID NO: 24956 - DNA, 37 bp, synthetic construct
  misc_feature 1..37: note = Synthetic oligonucleotide
  source 1..37: mol_type = other DNA
agttgtactttgaggtaaatgaacggtaatctaaaat

SEQ ID NO: 24957 - DNA, 38 bp, synthetic construct
  misc_feature 1..38: note = Synthetic oligonucleotide
  source 1..38: mol_type = other DNA
agttgtagctcccgctctcaccccggatagctacactc

SEQ ID NO: 24958 - DNA, 37 bp, synthetic construct
  misc_feature 1..37: note = Synthetic oligonucleotide
  source 1..37: mol_type = other DNA
agttgtagtcccctttttcctctctttatgctataat

SEQ ID NO: 24959 - DNA, 37 bp, synthetic construct
  misc_feature 1..37: note = Synthetic oligonucleotide
  source 1..37: mol_type = other DNA
agttgtagttcccctcagttttccggtgtgctataat

SEQ ID NO: 24960 - DNA, 37 bp, synthetic construct; identical to SEQ ID NO: 11040
  misc_feature 1..37: note = Synthetic oligonucleotide
  source 1..37: mol_type = other DNA

SEQ ID NO: 24961 - DNA, 37 bp, synthetic construct
  misc_feature 1..37: note = Synthetic oligonucleotide
  source 1..37: mol_type = other DNA
agttgtgaattgaccacagaccaagaaatgctatgat

SEQ ID NO: 24962 - DNA, 37 bp, synthetic construct; identical to SEQ ID NO: 24961
  misc_feature 1..37: note = Synthetic oligonucleotide
  source 1..37: mol_type = other DNA

SEQ ID NO: 24963 - DNA, 37 bp, synthetic construct; identical to SEQ ID NO: 24961
  misc_feature 1..37: note = Synthetic oligonucleotide
  source 1..37: mol_type = other DNA

SEQ ID NO: 24964 - DNA, 37 bp, synthetic construct; identical to SEQ ID NO: 24961
  misc_feature 1..37: note = Synthetic oligonucleotide
  source 1..37: mol_type = other DNA

SEQ ID NO: 24965 - DNA, 37 bp, synthetic construct
  misc_feature 1..37: note = Synthetic oligonucleotide
  source 1..37: mol_type = other DNA
agttgtggattgaccgcgggccgggattggttacact

SEQ ID NO: 24966 - DNA, 37 bp, synthetic construct
  misc_feature 1..37: note = Synthetic oligonucleotide
  source 1..37: mol_type = other DNA
agttgtggattgatcagtttagggaataagagacaac

SEQ ID NO: 24967 - DNA, 37 bp, synthetic construct
  misc_feature 1..37: note = Synthetic oligonucleotide
  source 1..37: mol_type = other DNA
agttgtggtttgatgtaggaaaagaacgatatacaac

SEQ ID NO: 24968 - DNA, 37 bp, synthetic construct
  misc_feature 1..37: note = Synthetic oligonucleotide
  source 1..37: mol_type = other DNA
agttgtggtttgattaaagattagaaaacacgatatt

SEQ ID NO: 24969 - DNA, 37 bp, synthetic construct
  misc_feature 1..37: note = Synthetic oligonucleotide
  source 1..37: mol_type = other DNA
agttgtggtttgttgacaagattgggtttattaaatt

SEQ ID NO: 24970 - DNA, 36 bp, synthetic construct
  misc_feature 1..36: note = Synthetic oligonucleotide
  source 1..36: mol_type = other DNA
agtttaacgtgtctgtaatagggggcaaatcaaaac

SEQ ID NO: 24971 - DNA, 37 bp, synthetic construct
  misc_feature 1..37: note = Synthetic oligonucleotide
  source 1..37: mol_type = other DNA
agtttaagaatattacaaaataacaaagctctcaaac

SEQ ID NO: 24972 - DNA, 36 bp, synthetic construct
  misc_feature 1..36: note = Synthetic oligonucleotide
  source 1..36: mol_type = other DNA
agtttaatcccctacgaatttacactgttctcaaac

SEQ ID NO: 24973 - DNA, 36 bp, synthetic construct; identical to SEQ ID NO: 24972
  misc_feature 1..36: note = Synthetic oligonucleotide
  source 1..36: mol_type = other DNA

SEQ ID NO: 24974 - DNA, 36 bp, synthetic construct; identical to SEQ ID NO: 24972
  misc_feature 1..36: note = Synthetic oligonucleotide
  source 1..36: mol_type = other DNA

SEQ ID NO: 24975 - DNA, 36 bp, synthetic construct
  misc_feature 1..36: note = Synthetic oligonucleotide
  source 1..36: mol_type = other DNA
agtttacatcatcgggatatgcgcactggccggaac

SEQ ID NO: 24976 - DNA, 36 bp, synthetic construct
  misc_feature 1..36: note = Synthetic oligonucleotide
  source 1..36: mol_type = other DNA
agtttacatcattgggatatgtgttctgtccggaac

SEQ ID NO: 24977 - DNA, 36 bp, synthetic construct; identical to SEQ ID NO: 11058
  misc_feature 1..36: note = Synthetic oligonucleotide
  source 1..36: mol_type = other DNA

SEQ ID NO: 24978 - DNA, 36 bp, synthetic construct; identical to SEQ ID NO: 11058
  misc_feature 1..36: note = Synthetic oligonucleotide
  source 1..36: mol_type = other DNA

SEQ ID NO: 24979 - DNA, 36 bp, synthetic construct; identical to SEQ ID NO: 11058
  misc_feature 1..36: note = Synthetic oligonucleotide
  source 1..36: mol_type = other DNA

SEQ ID NO: 24980 - DNA, 35 bp, synthetic construct
  misc_feature 1..35: note = Synthetic oligonucleotide
  source 1..35: mol_type = other DNA
agtttaccataacagtgaatcagagggaataaaaa

SEQ ID NO: 24981 - DNA, 36 bp, synthetic construct
  misc_feature 1..36: note = Synthetic oligonucleotide
  source 1..36: mol_type = other DNA
agtttaccataacagtgaatcagagggaataaaaac

SEQ ID NO: 24982 - DNA, 36 bp, synthetic construct
  misc_feature 1..36: note = Synthetic oligonucleotide
  source 1..36: mol_type = other DNA
agtttaccgatagggagtctgcccgcgcgccccaac

SEQ ID NO: 24983 - DNA, 36 bp, synthetic construct; identical to SEQ ID NO: 11060
  misc_feature 1..36: note = Synthetic oligonucleotide
  source 1..36: mol_type = other DNA

SEQ ID NO: 24984 - DNA, 36 bp, synthetic construct
  misc_feature 1..36: note = Synthetic oligonucleotide
  source 1..36: mol_type = other DNA
agtttactctatcggagtactttagggaagaaaaac

SEQ ID NO: 24985 - DNA, 36 bp, synthetic construct
  misc_feature 1..36: note = Synthetic oligonucleotide
  source 1..36: mol_type = other DNA
agtttactgaagaggaatctgtccggtcgccccaac

SEQ ID NO: 24986 - DNA, 36 bp, synthetic construct; identical to SEQ ID NO: 11063
  misc_feature 1..36: note = Synthetic oligonucleotide
  source 1..36: mol_type = other DNA

SEQ ID NO: 24987 - DNA, 36 bp, synthetic construct; identical to SEQ ID NO: 11064
  misc_feature 1..36: note = Synthetic oligonucleotide
  source 1..36: mol_type = other DNA

SEQ ID NO: 24988 - DNA, 36 bp, synthetic construct; identical to SEQ ID NO: 11064
  misc_feature 1..36: note = Synthetic oligonucleotide
  source 1..36: mol_type = other DNA

SEQ ID NO: 24989 - DNA, 36 bp, synthetic construct; identical to SEQ ID NO: 11064
  misc_feature 1..36: note = Synthetic oligonucleotide
  source 1..36: mol_type = other DNA

SEQ ID NO: 24990 - DNA, 36 bp, synthetic construct; identical to SEQ ID NO: 11065
  misc_feature 1..36: note = Synthetic oligonucleotide
  source 1..36: mol_type = other DNA

SEQ ID NO: 24991 - DNA, 35 bp, synthetic construct
  misc_feature 1..35: note = Synthetic oligonucleotide
  source 1..35: mol_type = other DNA
agtttagcagataagagaatcgccgcaactcacaa

SEQ ID NO: 24992 - DNA, 36 bp, synthetic construct
  misc_feature 1..36: note = Synthetic oligonucleotide
  source 1..36: mol_type = other DNA
agtttagcagataagagaatcgccgcaactcacaac

SEQ ID NO: 24993 - DNA, 36 bp, synthetic construct
  misc_feature 1..36: note = Synthetic oligonucleotide
  source 1..36: mol_type = other DNA
agtttagcagatagaaatttgcggtctagccggaac

SEQ ID NO: 24994 - DNA, 36 bp, synthetic construct
  misc_feature 1..36: note = Synthetic oligonucleotide
  source 1..36: mol_type = other DNA
agtttagcagattgggatttgcgctctggccggaac

SEQ ID NO: 24995 - DNA, 36 bp, synthetic construct; identical to SEQ ID NO: 11073
  misc_feature 1..36: note = Synthetic oligonucleotide
  source 1..36: mol_type = other DNA

SEQ ID NO: 24996 - DNA, 36 bp, synthetic construct
  misc_feature 1..36: note = Synthetic oligonucleotide
  source 1..36: mol_type = other DNA
agtttagcagattgggatttgtgctctgaccggaac

SEQ ID NO: 24997 - DNA, 37 bp, synthetic construct
  misc_feature 1..37: note = Synthetic oligonucleotide
  source 1..37: mol_type = other DNA
agtttagcagattgggatttgtgctctgaccggaact

SEQ ID NO: 24998 - DNA, 36 bp, synthetic construct; identical to SEQ ID NO: 11075
  misc_feature 1..36: note = Synthetic oligonucleotide
  source 1..36: mol_type = other DNA

SEQ ID NO: 24999 - DNA, 36 bp, synthetic construct
  misc_feature 1..36: note = Synthetic oligonucleotide
  source 1..36: mol_type = other DNA
agtttagccatcccaagccgggggggaagacaaaac

SEQ ID NO: 25000 - DNA, 36 bp, synthetic construct
  misc_feature 1..36: note = Synthetic oligonucleotide
  source 1..36: mol_type = other DNA
agtttagccgataggaaatcgcgcgccagccgcaac

SEQ ID NO: 25001 - DNA, 37 bp, synthetic construct
  misc_feature 1..37: note = Synthetic oligonucleotide
  source 1..37: mol_type = other DNA
agtttagccgataggaaatcgcgcgccagccgcaact

SEQ ID NO: 25002 - DNA, 36 bp, synthetic construct; identical to SEQ ID NO: 11080
  misc_feature 1..36: note = Synthetic oligonucleotide
  source 1..36: mol_type = other DNA

SEQ ID NO: 25003 - DNA, 36 bp, synthetic construct; identical to SEQ ID NO: 11080
  misc_feature 1..36: note = Synthetic oligonucleotide
  source 1..36: mol_type = other DNA

SEQ ID NO: 25004 - DNA, 36 bp, synthetic construct
  misc_feature 1..36: note = Synthetic oligonucleotide
  source 1..36: mol_type = other DNA
agtttagccgataggagatcggggaccagccgcaac

SEQ ID NO: 25005 - DNA, 36 bp, synthetic construct; identical to SEQ ID NO: 25004
  misc_feature 1..36: note = Synthetic oligonucleotide
  source 1..36: mol_type = other DNA

SEQ ID NO: 25006 - DNA, 37 bp, synthetic construct
  misc_feature 1..37: note = Synthetic oligonucleotide
  source 1..37: mol_type = other DNA
agtttagccgatgaggaatcgcggtccagccgcaacg

SEQ ID NO: 25007 - DNA, 36 bp, synthetic construct
  misc_feature 1..36: note = Synthetic oligonucleotide
  source 1..36: mol_type = other DNA
agtttagccgatgggatttcgcggtccaaccgcaac

SEQ ID NO: 25008 - DNA, 36 bp, synthetic construct
  misc_feature 1..36: note = Synthetic oligonucleotide
  source 1..36: mol_type = other DNA
agtttagccgatgggggaatgcgggccaaccgcaac

SEQ ID NO: 25009 - DNA, 36 bp, synthetic construct; identical to SEQ ID NO: 11086
  misc_feature 1..36: note = Synthetic oligonucleotide
  source 1..36: mol_type = other DNA

SEQ ID NO: 25010 - DNA, 36 bp, synthetic construct
  misc_feature 1..36: note = Synthetic oligonucleotide
  source 1..36: mol_type = other DNA
agtttagcggccgggtgatcgagggccaaccgcaac

SEQ ID NO: 25011 - DNA, 36 bp, synthetic construct; identical to SEQ ID NO: 11090
  misc_feature 1..36: note = Synthetic oligonucleotide
  source 1..36: mol_type = other DNA

SEQ ID NO: 25012 - DNA, 36 bp, synthetic construct
  misc_feature 1..36: note = Synthetic oligonucleotide
  source 1..36: mol_type = other DNA
agtttagcgggtgagagaatggtcggccaccaaaac

SEQ ID NO: 25013 - DNA, 36 bp, synthetic construct; identical to SEQ ID NO: 25012
  misc_feature 1..36: note = Synthetic oligonucleotide
  source 1..36: mol_type = other DNA

SEQ ID NO: 25014 - DNA, 36 bp, synthetic construct
  misc_feature 1..36: note = Synthetic oligonucleotide
  source 1..36: mol_type = other DNA
agtttagcggtctgctgattgagggccaaccgcaac

SEQ ID NO: 25015 - DNA, 36 bp, synthetic construct; identical to SEQ ID NO: 11091
  misc_feature 1..36: note = Synthetic oligonucleotide
  source 1..36: mol_type = other DNA

SEQ ID NO: 25016 - DNA, 36 bp, synthetic construct; identical to SEQ ID NO: 11091
  misc_feature 1..36: note = Synthetic oligonucleotide
  source 1..36: mol_type = other DNA

SEQ ID NO: 25017 - DNA, 36 bp, synthetic construct; identical to SEQ ID NO: 11091
  misc_feature 1..36: note = Synthetic oligonucleotide
  source 1..36: mol_type = other DNA

SEQ ID NO: 25018 - DNA, 36 bp, synthetic construct
  misc_feature 1..36: note = Synthetic oligonucleotide
  source 1..36: mol_type = other DNA
agtttagcggtctggtgattgagggccaaccgcaac

SEQ ID NO: 25019 - DNA, 36 bp, synthetic construct
  misc_feature 1..36: note = Synthetic oligonucleotide
  source 1..36: mol_type = other DNA
agtttagctaattgggatatgagctctggccggaac

SEQ ID NO: 25020 - DNA, 36 bp, synthetic construct
  misc_feature 1..36: note = Synthetic oligonucleotide
  source 1..36: mol_type = other DNA
agtttagctgatcaggaaatgcgctccaaccgcaac

SEQ ID NO: 25021 - DNA, 36 bp, synthetic construct; identical to SEQ ID NO: 11099
  misc_feature 1..36: note = Synthetic oligonucleotide
  source 1..36: mol_type = other DNA

SEQ ID NO: 25022 - DNA, 36 bp, synthetic construct
  misc_feature 1..36: note = Synthetic oligonucleotide
  source 1..36: mol_type = other DNA
agtttatcagatacgaaaatcaccgcaaatcacaac

SEQ ID NO: 25023 - DNA, 34 bp, synthetic construct
  misc_feature 1..34: note = Synthetic oligonucleotide
  source 1..34: mol_type = other DNA
agtttcaacctacgcctacgcacgtagtgcggcc

SEQ ID NO: 25024 - DNA, 36 bp, synthetic construct
  misc_feature 1..36: note = Synthetic oligonucleotide
  source 1..36: mol_type = other DNA
agtttctacgcctttgaattggaatcaaggcaaagc

SEQ ID NO: 25025 - DNA, 37 bp, synthetic construct; identical to SEQ ID NO: 11110
  misc_feature 1..37: note = Synthetic oligonucleotide
  source 1..37: mol_type = other DNA

SEQ ID NO: 25026 - DNA, 28 bp, synthetic construct
  misc_feature 1..28: note = Synthetic oligonucleotide
  source 1..28: mol_type = other DNA
agtttgagagtattgttattttgaatac

SEQ ID NO: 25027 - DNA, 34 bp, synthetic construct
  misc_feature 1..34: note = Synthetic oligonucleotide
  source 1..34: mol_type = other DNA
agtttgagcaaaaggtaatgcgacatatattcaa

SEQ ID NO: 25028 - DNA, 36 bp, synthetic construct
  misc_feature 1..36: note = Synthetic oligonucleotide
  source 1..36: mol_type = other DNA
agtttgagcaccatacattttacatcattttcaaac

SEQ ID NO: 25029 - DNA, 36 bp, synthetic construct; identical to SEQ ID NO: 25028
  misc_feature 1..36: note = Synthetic oligonucleotide
  source 1..36: mol_type = other DNA

SEQ ID NO: 25030 - DNA, 36 bp, synthetic construct; identical to SEQ ID NO: 11114
  misc_feature 1..36: note = Synthetic oligonucleotide
  source 1..36: mol_type = other DNA

SEQ ID NO: 25031 - DNA, 36 bp, synthetic construct; identical to SEQ ID NO: 11115
  misc_feature 1..36: note = Synthetic oligonucleotide
  source 1..36: mol_type = other DNA

SEQ ID NO: 25032 - DNA, 36 bp, synthetic construct; identical to SEQ ID NO: 11115
  misc_feature 1..36: note = Synthetic oligonucleotide
  source 1..36: mol_type = other DNA

SEQ ID NO: 25033 - DNA, 36 bp, synthetic construct
  misc_feature 1..36: note = Synthetic oligonucleotide
  source 1..36: mol_type = other DNA
agtttgccgcacccgtttttggaatcaaggcaaagc

SEQ ID NO: 25034 - DNA, 36 bp, synthetic construct; identical to SEQ ID NO: 25033
  misc_feature 1..36: note = Synthetic oligonucleotide
  source 1..36: mol_type = other DNA

SEQ ID NO: 25035 - DNA, 36 bp, synthetic construct
  misc_feature 1..36: note = Synthetic oligonucleotide
  source 1..36: mol_type = other DNA
agtttgccgcccccgtttttggaatcaaggcaaagc

SEQ ID NO: 25036 - DNA, 36 bp, synthetic construct
  misc_feature 1..36: note = Synthetic oligonucleotide
  source 1..36: mol_type = other DNA
agtttgcgccgcccgtttttggaatcaaggcaaagc

SEQ ID NO: 25037 - DNA, 36 bp, synthetic construct; identical to SEQ ID NO: 11121
  misc_feature 1..36: note = Synthetic oligonucleotide
  source 1..36: mol_type = other DNA

SEQ ID NO: 25038 - DNA, 36 bp, synthetic construct
  misc_feature 1..36: note = Synthetic oligonucleotide
  source 1..36: mol_type = other DNA
agtttgctctccccagtttctgaatcaaggcaaagc

SEQ ID NO: 25039 - DNA, 36 bp, synthetic construct; identical to SEQ ID NO: 25038
  misc_feature 1..36: note = Synthetic oligonucleotide
  source 1..36: mol_type = other DNA

SEQ ID NO: 25040 - DNA, 36 bp, synthetic construct
  misc_feature 1..36: note = Synthetic oligonucleotide
  source 1..36: mol_type = other DNA
agtttgctctgcccaaaaagggaatcaagacaaagc

SEQ ID NO: 25041 - DNA, 36 bp, synthetic construct
  misc_feature 1..36: note = Synthetic oligonucleotide
  source 1..36: mol_type = other DNA
agtttgtcatcccttggacggggggcaatcccaaac

SEQ ID NO: 25042 - DNA, 37 bp, synthetic construct
  misc_feature 1..37: note = Synthetic oligonucleotide
  source 1..37: mol_type = other DNA
agtttgtctgcctaagaattggaatcaaggcaaagct

SEQ ID NO: 25043 - DNA, 37 bp, synthetic construct
  misc_feature 1..37: note = Synthetic oligonucleotide
  source 1..37: mol_type = other DNA
agttttacctagtgcataaattacataactctcaaac

SEQ ID NO: 25044 - DNA, 37 bp, synthetic construct
  misc_feature 1..37: note = Synthetic oligonucleotide
  source 1..37: mol_type = other DNA
agttttactaccttatagatttacactattctcaaac

SEQ ID NO: 25045 - DNA, 37 bp, synthetic construct
  misc_feature 1..37: note = Synthetic oligonucleotide
  source 1..37: mol_type = other DNA
agttttactaccttatgaaattacactactctcaaac

SEQ ID NO: 25046 - DNA, 37 bp, synthetic construct; identical to SEQ ID NO: 25045
  misc_feature 1..37: note = Synthetic oligonucleotide
  source 1..37: mol_type = other DNA

SEQ ID NO: 25047 - DNA, 37 bp, synthetic construct
  misc_feature 1..37: note = Synthetic oligonucleotide
  source 1..37: mol_type = other DNA
agttttagatggttgttagatcaataaggcttagatc

SEQ ID NO: 25048 - DNA, 38 bp, synthetic construct
  misc_feature 1..38: note = Synthetic oligonucleotide
  source 1..38: mol_type = other DNA
agttttaggagtatgttattttgaatggtaacaaaact

SEQ ID NO: 25049 - DNA, 37 bp, synthetic construct
  misc_feature 1..37: note = Synthetic oligonucleotide
  source 1..37: mol_type = other DNA
agttttgccttccccccggaagtgcatcgggtaaaat

SEQ ID NO: 25050 - DNA, 37 bp, synthetic construct
  misc_feature 1..37: note = Synthetic oligonucleotide
  source 1..37: mol_type = other DNA
agttttggaaccatgtaaaagcaaatgattccaaatg

SEQ ID NO: 25051 - DNA, 37 bp, synthetic construct
  misc_feature 1..37: note = Synthetic oligonucleotide
  source 1..37: mol_type = other DNA
agttttggaaccattcgaaacaacacagctctaaaac

SEQ ID NO: 25052 - DNA, 37 bp, synthetic construct
  misc_feature 1..37: note = Synthetic oligonucleotide
  source 1..37: mol_type = other DNA
agttttgtcttcccccccggcttgggatggctaaact

SEQ ID NO: 25053 - DNA, 37 bp, synthetic construct; identical to SEQ ID NO: 11126
  misc_feature 1..37: note = Synthetic oligonucleotide
  source 1..37: mol_type = other DNA

SEQ ID NO: 25054 - DNA, 36 bp, synthetic construct
  misc_feature 1..36: note = Synthetic oligonucleotide
  source 1..36: mol_type = other DNA
ataaaatctaatagctgtttggtgtcaagctgcaac

SEQ ID NO: 25055 - DNA, 36 bp, synthetic construct; identical to SEQ ID NO: 25054
  misc_feature 1..36: note = Synthetic oligonucleotide
  source 1..36: mol_type = other DNA

SEQ ID NO: 25056 - DNA, 36 bp, synthetic construct; identical to SEQ ID NO: 25054
  misc_feature 1..36: note = Synthetic oligonucleotide
  source 1..36: mol_type = other DNA

SEQ ID NO: 25057 - DNA, 36 bp, synthetic construct
  misc_feature 1..36: note = Synthetic oligonucleotide
  source 1..36: mol_type = other DNA
ataataacagtttagatttagtagtctagccgcaac

SEQ ID NO: 25058 - DNA, 25 bp, synthetic construct
  misc_feature 1..25: note = Synthetic oligonucleotide
  source 1..25: mol_type = other DNA
ataatacctatagtcaaaaatgact

SEQ ID NO: 25059 - DNA, 25 bp, synthetic construct
  misc_feature 1..25: note = Synthetic oligonucleotide
  source 1..25: mol_type = other DNA
ataatacctatagtcaaaaatgact

SEQ ID NO: 25060 - DNA, 36 bp, synthetic construct
  misc_feature 1..36: note = Synthetic oligonucleotide
  source 1..36: mol_type = other DNA
ataatagcattttagagaacgtcgtcaagccacaac

SEQ ID NO: 25061 - DNA, 37 bp, synthetic construct
  misc_feature 1..37: note = Synthetic oligonucleotide
  source 1..37: mol_type = other DNA
ataatgcaaagatactaattttaaagcaaatcacaac

SEQ ID NO: 25062 - DNA, 29 bp, synthetic construct
  misc_feature 1..29: note = Synthetic oligonucleotide
  source 1..29: mol_type = other DNA
ataccgtaaacggtaagcactgttgcaac

SEQ ID NO: 25063 - DNA, 34 bp, synthetic construct
  misc_feature 1..34: note = Synthetic oligonucleotide
  source 1..34: mol_type = other DNA
atacgaaggtactgaattgaaagctaatcacaac

SEQ ID NO: 25064 - DNA, 36 bp, synthetic construct
  misc_feature 1..36: note = Synthetic oligonucleotide
  source 1..36: mol_type = other DNA
atataccttatacctaaaattacagagtactaaaac

SEQ ID NO: 25065 - DNA, 36 bp, synthetic construct
  misc_feature 1..36: note = Synthetic oligonucleotide
  source 1..36: mol_type = other DNA
atatcactctataagggtttggtgtcaagctgaaac

SEQ ID NO: 25066 - DNA, 36 bp, synthetic construct; identical to SEQ ID NO: 25065
  misc_feature 1..36: note = Synthetic oligonucleotide
  source 1..36: mol_type = other DNA

SEQ ID NO: 25067 - DNA, 36 bp, synthetic construct
  misc_feature 1..36: note = Synthetic oligonucleotide
  source 1..36: mol_type = other DNA
atatcactctataaggttttggtgtcaagctgaaac

SEQ ID NO: 25068 - DNA, 36 bp, synthetic construct
  misc_feature 1..36: note = Synthetic oligonucleotide
  source 1..36: mol_type = other DNA
atatcactctatagctgtttggtgtcaagctgaaac

SEQ ID NO: 25069 - DNA, 36 bp, synthetic construct
  misc_feature 1..36: note = Synthetic oligonucleotide
  source 1..36: mol_type = other DNA
atattgaagtaatcacagatagcactacttccaaac

SEQ ID NO: 25070 - DNA, 36 bp, synthetic construct
  misc_feature 1..36: note = Synthetic oligonucleotide
  source 1..36: mol_type = other DNA
atcataacatacctagtgatgccagggagctacagc

SEQ ID NO: 25071 - DNA, 36 bp, synthetic construct
  misc_feature 1..36: note = Synthetic oligonucleotide
  source 1..36: mol_type = other DNA
atcataattccctaatagctcttggtatggtataat

SEQ ID NO: 25072 - DNA, 36 bp, synthetic construct; identical to SEQ ID NO: 25071
  misc_feature 1..36: note = Synthetic oligonucleotide
  source 1..36: mol_type = other DNA

SEQ ID NO: 25073 - DNA, 36 bp, synthetic construct
  misc_feature 1..36: note = Synthetic oligonucleotide
  source 1..36: mol_type = other DNA
atcataccataccaagaactaacagggaactacaac

SEQ ID NO: 25074 - DNA, 36 bp, synthetic construct
  misc_feature 1..36: note = Synthetic oligonucleotide
  source 1..36: mol_type = other DNA
atcatagcacagccgtgtcggacgggaagctatgac

SEQ ID NO: 25075 - DNA, 36 bp, synthetic construct
  misc_feature 1..36: note = Synthetic oligonucleotide
  source 1..36: mol_type = other DNA
atcatagcatagccgtgtcggatgggaagctatgac

SEQ ID NO: 25076 - DNA, 36 bp, synthetic construct; identical to SEQ ID NO: 25075
  misc_feature 1..36: note = Synthetic oligonucleotide
  source 1..36: mol_type = other DNA

SEQ ID NO: 25077 - DNA, 37 bp, synthetic construct
  misc_feature 1..37: note = Synthetic oligonucleotide
  source 1..37: mol_type = other DNA
atcatagcatttcttggtctgtggtcaattcacaacc

SEQ ID NO: 25078 - DNA, 36 bp, synthetic construct; identical to SEQ ID NO: 11142
  misc_feature 1..36: note = Synthetic oligonucleotide
  source 1..36: mol_type = other DNA

SEQ ID NO: 25079 - DNA, 36 bp, synthetic construct
  misc_feature 1..36: note = Synthetic oligonucleotide
  source 1..36: mol_type = other DNA
atcatagctgttcagagatcgcggtccagcggcaac

SEQ ID NO: 25080 - DNA, 36 bp, synthetic construct; identical to SEQ ID NO: 25079
  misc_feature 1..36: note = Synthetic oligonucleotide
  source 1..36: mol_type = other DNA

SEQ ID NO: 25081 - DNA, 36 bp, synthetic construct
  misc_feature 1..36: note = Synthetic oligonucleotide
  source 1..36: mol_type = other DNA
atcatagttccctaacagctcttggtatggtataat

SEQ ID NO: 25082 - DNA, 36 bp, synthetic construct; identical to SEQ ID NO: 11147
  misc_feature 1..36: note = Synthetic oligonucleotide
  source 1..36: mol_type = other DNA

SEQ ID NO: 25083 - DNA, 36 bp, synthetic construct; identical to SEQ ID NO: 11147
  misc_feature 1..36: note = Synthetic oligonucleotide
  source 1..36: mol_type = other DNA

SEQ ID NO: 25084 - DNA, 36 bp, synthetic construct; identical to SEQ ID NO: 11147
  misc_feature 1..36: note = Synthetic oligonucleotide
  source 1..36: mol_type = other DNA

SEQ ID NO: 25085 - DNA, 36 bp, synthetic construct; identical to SEQ ID NO: 11147
  misc_feature 1..36: note = Synthetic oligonucleotide
  source 1..36: mol_type = other DNA

SEQ ID NO: 25086 - DNA, 36 bp, synthetic construct; identical to SEQ ID NO: 11147
  misc_feature 1..36: note = Synthetic oligonucleotide
  source 1..36: mol_type = other DNA

SEQ ID NO: 25087 - DNA, 36 bp, synthetic construct; identical to SEQ ID NO: 11147
  misc_feature 1..36: note = Synthetic oligonucleotide
  source 1..36: mol_type = other DNA

SEQ ID NO: 25088 - DNA, 36 bp, synthetic construct; identical to SEQ ID NO: 11147
  misc_feature 1..36: note = Synthetic oligonucleotide
  source 1..36: mol_type = other DNA

SEQ ID NO: 25089 - DNA, 36 bp, synthetic construct; identical to SEQ ID NO: 11147
  misc_feature 1..36: note = Synthetic oligonucleotide
  source 1..36: mol_type = other DNA

SEQ ID NO: 25090 - DNA, 36 bp, synthetic construct; identical to SEQ ID NO: 11147
  misc_feature 1..36: note = Synthetic oligonucleotide
  source 1..36: mol_type = other DNA

SEQ ID NO: 25091 - DNA, 36 bp, synthetic construct; identical to SEQ ID NO: 11147
  misc_feature 1..36: note = Synthetic oligonucleotide
  source 1..36: mol_type = other DNA

SEQ ID NO: 25092 - DNA, 36 bp, synthetic construct; identical to SEQ ID NO: 11147
  misc_feature 1..36: note = Synthetic oligonucleotide
  source 1..36: mol_type = other DNA

SEQ ID NO: 25093 - DNA, 36 bp, synthetic construct; identical to SEQ ID NO: 11147
  misc_feature 1..36: note = Synthetic oligonucleotide
  source 1..36: mol_type = other DNA

SEQ ID NO: 25094 - DNA, 36 bp, synthetic construct; identical to SEQ ID NO: 11147
  misc_feature 1..36: note = Synthetic oligonucleotide
  source 1..36: mol_type = other DNA

SEQ ID NO: 25095 - DNA, 36 bp, synthetic construct; identical to SEQ ID NO: 11147
  misc_feature 1..36: note = Synthetic oligonucleotide
  source 1..36: mol_type = other DNA

SEQ ID NO: 25096 - DNA, 36 bp, synthetic construct; identical to SEQ ID NO: 11147
  misc_feature 1..36: note = Synthetic oligonucleotide
  source 1..36: mol_type = other DNA

SEQ ID NO: 25097 - DNA, 36 bp, synthetic construct; identical to SEQ ID NO: 11147
  misc_feature 1..36: note = Synthetic oligonucleotide
  source 1..36: mol_type = other DNA

SEQ ID NO: 25098 - DNA, 36 bp, synthetic construct; identical to SEQ ID NO: 11147
  misc_feature 1..36: note = Synthetic oligonucleotide
  source 1..36: mol_type = other DNA

SEQ ID NO: 25099 - DNA, 36 bp, synthetic construct; identical to SEQ ID NO: 11147
  misc_feature 1..36: note = Synthetic oligonucleotide
  source 1..36: mol_type = other DNA

SEQ ID NO: 25100 - DNA, 36 bp, synthetic construct; identical to SEQ ID NO: 11147
  misc_feature 1..36: note = Synthetic oligonucleotide
  source 1..36: mol_type = other DNA

SEQ ID NO: 25101 - DNA, 36 bp, synthetic construct; identical to SEQ ID NO: 11147
  misc_feature 1..36: note = Synthetic oligonucleotide
  source 1..36: mol_type = other DNA

SEQ ID NO: 25102 - DNA, 36 bp, synthetic construct
  misc_feature 1..36: note = Synthetic oligonucleotide
  source 1..36: mol_type = other DNA
atcatagttccctaatagctcttggtgtggtataat

SEQ ID NO: 25103 - DNA, 36 bp, synthetic construct
  misc_feature 1..36: note = Synthetic oligonucleotide
  source 1..36: mol_type = other DNA
atcatagttccctaatagttcttggtatggtataat

SEQ ID NO: 25104 - DNA, 36 bp, synthetic construct
  misc_feature 1..36: note = Synthetic oligonucleotide
  source 1..36: mol_type = other DNA
atcatagttccctgatagctcttggtatggtataat

SEQ ID NO: 25105 - DNA, 36 bp, synthetic construct; identical to SEQ ID NO: 11148
  misc_feature 1..36: note = Synthetic oligonucleotide
  source 1..36: mol_type = other DNA

SEQ ID NO: 25106 - DNA, 36 bp, synthetic construct; identical to SEQ ID NO: 11148
  misc_feature 1..36: note = Synthetic oligonucleotide
  source 1..36: mol_type = other DNA

SEQ ID NO: 25107 - DNA, 36 bp, synthetic construct; identical to SEQ ID NO: 11148
  misc_feature 1..36: note = Synthetic oligonucleotide
  source 1..36: mol_type = other DNA

SEQ ID NO: 25108 - DNA, 36 bp, synthetic construct
  misc_feature 1..36: note = Synthetic oligonucleotide
  source 1..36: mol_type = other DNA
atcctaccaagggcaaatcggtagggaaaccacggc

SEQ ID NO: 25109 - DNA, 36 bp, synthetic construct; identical to SEQ ID NO: 25108
  misc_feature 1..36: note = Synthetic oligonucleotide
  source 1..36: mol_type = other DNA

SEQ ID NO: 25110 - DNA, 36 bp, synthetic construct; identical to SEQ ID NO: 25108
  misc_feature 1..36: note = Synthetic oligonucleotide
  source 1..36: mol_type = other DNA

SEQ ID NO: 25111 - DNA, 36 bp, synthetic construct
  misc_feature 1..36: note = Synthetic oligonucleotide
  source 1..36: mol_type = other DNA
atcctaccacaggtaagtcggtaaggaaaccacggc

SEQ ID NO: 25112 - DNA, 36 bp, synthetic construct; identical to SEQ ID NO: 11151
  misc_feature 1..36: note = Synthetic oligonucleotide
  source 1..36: mol_type = other DNA

SEQ ID NO: 25113 - DNA, 36 bp, synthetic construct
  misc_feature 1..36: note = Synthetic oligonucleotide
  source 1..36: mol_type = other DNA
atcctaccataggcaaatcggtagggaaaccacggc

SEQ ID NO: 25114 - DNA, 36 bp, synthetic construct
  misc_feature 1..36: note = Synthetic oligonucleotide
  source 1..36: mol_type = other DNA
atcctaccatgggcaaatcggtagggaaaccacggc

SEQ ID NO: 25115 - DNA, 36 bp, synthetic construct; identical to SEQ ID NO: 25114
  misc_feature 1..36: note = Synthetic oligonucleotide
  source 1..36: mol_type = other DNA

SEQ ID NO: 25116 - DNA, 36 bp, synthetic construct; identical to SEQ ID NO: 25114
  misc_feature 1..36: note = Synthetic oligonucleotide
  source 1..36: mol_type = other DNA

SEQ ID NO: 25117 - DNA, 36 bp, synthetic construct; identical to SEQ ID NO: 11153
  misc_feature 1..36: note = Synthetic oligonucleotide
  source 1..36: mol_type = other DNA

SEQ ID NO: 25118 - DNA, 36 bp, synthetic construct; identical to SEQ ID NO: 11154
  misc_feature 1..36: note = Synthetic oligonucleotide
  source 1..36: mol_type = other DNA

SEQ ID NO: 25119 - DNA, 36 bp, synthetic construct; identical to SEQ ID NO: 11154
  misc_feature 1..36: note = Synthetic oligonucleotide
  source 1..36: mol_type = other DNA

SEQ ID NO: 25120 - DNA, 36 bp, synthetic construct; identical to SEQ ID NO: 11154
  misc_feature 1..36: note = Synthetic oligonucleotide
  source 1..36: mol_type = other DNA

SEQ ID NO: 25121 - DNA, 36 bp, synthetic construct; identical to SEQ ID NO: 11154
  misc_feature 1..36: note = Synthetic oligonucleotide
  source 1..36: mol_type = other DNA

SEQ ID NO: 25122 - DNA, 36 bp, synthetic construct
  misc_feature 1..36: note = Synthetic oligonucleotide
  source 1..36: mol_type = other DNA
atcctattctagcaagaatccatatggtaacaaaac

SEQ ID NO: 25123 - DNA, 37 bp, synthetic construct
  misc_feature 1..37: note = Synthetic oligonucleotide
  source 1..37: mol_type = other DNA
atcgcaacggagaagaaaaatcaggttggctgaaacg

SEQ ID NO: 25124 - DNA, 36 bp, synthetic construct
  misc_feature 1..36: note = Synthetic oligonucleotide
  source 1..36: mol_type = other DNA
atcgcaacggagaggaaaaatcaggttggctgaaac

SEQ ID NO: 25125 - DNA, 36 bp, synthetic construct
  misc_feature 1..36: note = Synthetic oligonucleotide
  source 1..36: mol_type = other DNA
atcgcgcttggcctgcgatttctgaacagctatcct

SEQ ID NO: 25126 - DNA, 36 bp, synthetic construct; identical to SEQ ID NO: 25125
  misc_feature 1..36: note = Synthetic oligonucleotide
  source 1..36: mol_type = other DNA

SEQ ID NO: 25127 - DNA, 36 bp, synthetic construct
  misc_feature 1..36: note = Synthetic oligonucleotide
  source 1..36: mol_type = other DNA
atcgtaaccaaactttccccgaggtcaatccacaac

SEQ ID NO: 25128 - DNA, 32 bp, synthetic construct
  misc_feature 1..32: note = Synthetic oligonucleotide
  source 1..32: mol_type = other DNA
atcgtagctatccggggtgagagagggaacta

SEQ ID NO: 25129 - DNA, 22 bp, synthetic construct
  misc_feature 1..22: note = Synthetic oligonucleotide
  source 1..22: mol_type = other DNA
atcgtagctcatccggggtgag

SEQ ID NO: 25130 - DNA, 37 bp, synthetic construct
  misc_feature 1..37: note = Synthetic oligonucleotide
  source 1..37: mol_type = other DNA
atcgtagctcatccggggtgagagagggagctacaac

SEQ ID NO: 25131 - DNA, 37 bp, synthetic construct; identical to SEQ ID NO: 25130
  misc_feature 1..37: note = Synthetic oligonucleotide
  source 1..37: mol_type = other DNA

SEQ ID NO: 25132 - DNA, 37 bp, synthetic construct; identical to SEQ ID NO: 25130
  misc_feature 1..37: note = Synthetic oligonucleotide
  source 1..37: mol_type = other DNA

SEQ ID NO: 25133 - DNA, 37 bp, synthetic construct; identical to SEQ ID NO: 25130
  misc_feature 1..37: note = Synthetic oligonucleotide
  source 1..37: mol_type = other DNA

SEQ ID NO: 25134 - DNA, 36 bp, synthetic construct
  misc_feature 1..36: note = Synthetic oligonucleotide
  source 1..36: mol_type = other DNA
atcgtagctgactccgccggggggtgaagtcaaaac

SEQ ID NO: 25135 - DNA, 36 bp, synthetic construct
  misc_feature 1..36: note = Synthetic oligonucleotide
  source 1..36: mol_type = other DNA
atctacaatagtagaaattacaaatgttttatagac

SEQ ID NO: 25136 - DNA, 36 bp, synthetic construct
  misc_feature 1..36: note = Synthetic oligonucleotide
  source 1..36: mol_type = other DNA
atctacaatagtagaaattacaaatgttttatagat

SEQ ID NO: 25137 - DNA, 36 bp, synthetic construct
  misc_feature 1..36: note = Synthetic oligonucleotide
  source 1..36: mol_type = other DNA
atctacaatagtagaaattataagtgtcttataggc

SEQ ID NO: 25138 - DNA, 36 bp, synthetic construct
  misc_feature 1..36: note = Synthetic oligonucleotide
  source 1..36: mol_type = other DNA
atctacaatagtagaaattatatagggttattaaac

SEQ ID NO: 25139 - DNA, 36 bp, synthetic construct
  misc_feature 1..36: note = Synthetic oligonucleotide
  source 1..36: mol_type = other DNA
atctacaatagtagaaattatatatagggttattaa

SEQ ID NO: 25140 - DNA, 36 bp, synthetic construct
  misc_feature 1..36: note = Synthetic oligonucleotide
  source 1..36: mol_type = other DNA
atctacaatagtagaaattctaagggttgattaaac

SEQ ID NO: 25141 - DNA, 36 bp, synthetic construct; identical to SEQ ID NO: 11163
  misc_feature 1..36: note = Synthetic oligonucleotide
  source 1..36: mol_type = other DNA

SEQ ID NO: 25142 - DNA, 36 bp, synthetic construct; identical to SEQ ID NO: 11164
  misc_feature 1..36: note = Synthetic oligonucleotide
  source 1..36: mol_type = other DNA

SEQ ID NO: 25143 - DNA, 36 bp, synthetic construct; identical to SEQ ID NO: 11164
  misc_feature 1..36: note = Synthetic oligonucleotide
  source 1..36: mol_type = other DNA

SEQ ID NO: 25144 - DNA, 35 bp, synthetic construct
  misc_feature 1..35: note = Synthetic oligonucleotide
  source 1..35: mol_type = other DNA
atcttagcggtctggtgattgagggcggcggcgag

SEQ ID NO: 25145 - DNA, 36 bp, synthetic construct
  misc_feature 1..36: note = Synthetic oligonucleotide
  source 1..36: mol_type = other DNA
atgagtaaaaatacaattttgaaagctattcacaac

SEQ ID NO: 25146 - DNA, 21 bp, synthetic construct
  misc_feature 1..21: note = Synthetic oligonucleotide
  source 1..21: mol_type = other DNA
atgctgcccgcctctgaattg

SEQ ID NO: 25147 - DNA, 36 bp, synthetic construct; identical to SEQ ID NO: 11174
  misc_feature 1..36: note = Synthetic oligonucleotide
  source 1..36: mol_type = other DNA

SEQ ID NO: 25148 - DNA, 36 bp, synthetic construct; identical to SEQ ID NO: 11174
  misc_feature 1..36: note = Synthetic oligonucleotide
  source 1..36: mol_type = other DNA

SEQ ID NO: 25149 - DNA, 36 bp, synthetic construct
  misc_feature 1..36: note = Synthetic oligonucleotide
  source 1..36: mol_type = other DNA
atggtaattgatcactgcctgccgtcaatccgcagc

SEQ ID NO: 25150 - DNA, 36 bp, synthetic construct; identical to SEQ ID NO: 11176
  misc_feature 1..36: note = Synthetic oligonucleotide
  source 1..36: mol_type = other DNA

SEQ ID NO: 25151 - DNA, 36 bp, synthetic construct; identical to SEQ ID NO: 11176
  misc_feature 1..36: note = Synthetic oligonucleotide
  source 1..36: mol_type = other DNA

SEQ ID NO: 25152 - DNA, 36 bp, synthetic construct; identical to SEQ ID NO: 11176
  misc_feature 1..36: note = Synthetic oligonucleotide
  source 1..36: mol_type = other DNA

SEQ ID NO: 25153 - DNA, 37 bp, synthetic construct; identical to SEQ ID NO: 11178
  misc_feature 1..37: note = Synthetic oligonucleotide
  source 1..37: mol_type = other DNA

SEQ ID NO: 25154 - DNA, 37 bp, synthetic construct; identical to SEQ ID NO: 11178
  misc_feature 1..37: note = Synthetic oligonucleotide
  source 1..37: mol_type = other DNA

SEQ ID NO: 25155 - DNA, 38 bp, synthetic construct
  misc_feature 1..38: note = Synthetic oligonucleotide
  source 1..38: mol_type = other DNA
atggtgcaaatgtactaatttgaaagcgaatcacaaca

SEQ ID NO: 25156 - DNA, 37 bp, synthetic construct
  misc_feature 1..37: note = Synthetic oligonucleotide
  source 1..37: mol_type = other DNA
atggttcaaagatactaaaatgaaagcaaatcacaac

SEQ ID NO: 25157 - DNA, 37 bp, synthetic construct; identical to SEQ ID NO: 25156
  misc_feature 1..37: note = Synthetic oligonucleotide
  source 1..37: mol_type = other DNA

SEQ ID NO: 25158 - DNA, 37 bp, synthetic construct; identical to SEQ ID NO: 25156
  misc_feature 1..37: note = Synthetic oligonucleotide
  source 1..37: mol_type = other DNA

SEQ ID NO: 25159 - DNA, 32 bp, synthetic construct
  misc_feature 1..32: note = Synthetic oligonucleotide
  source 1..32: mol_type = other DNA
atgtactgaaaaatttgaaagtaaatcacaac

SEQ ID NO: 25160 - DNA, 36 bp, synthetic construct
  misc_feature 1..36: note = Synthetic oligonucleotide
  source 1..36: mol_type = other DNA
atgttgcatcacccaattttggaatcaaggcaaagc

SEQ ID NO: 25161 - DNA, 36 bp, synthetic construct; identical to SEQ ID NO: 11180
  misc_feature 1..36: note = Synthetic oligonucleotide
  source 1..36: mol_type = other DNA

SEQ ID NO: 25162 - DNA, 36 bp, synthetic construct; identical to SEQ ID NO: 11180
  misc_feature 1..36: note = Synthetic oligonucleotide
  source 1..36: mol_type = other DNA

SEQ ID NO: 25163 - DNA, 36 bp, synthetic construct; identical to SEQ ID NO: 11180
  misc_feature 1..36: note = Synthetic oligonucleotide
  source 1..36: mol_type = other DNA

SEQ ID NO: 25164 - DNA, 36 bp, synthetic construct
  misc_feature 1..36: note = Synthetic oligonucleotide
  source 1..36: mol_type = other DNA
atgttgcctgtctaagaattggaatcaaggcaaagc

SEQ ID NO: 25165 - DNA, 37 bp, synthetic construct
  misc_feature 1..37: note = Synthetic oligonucleotide
  source 1..37: mol_type = other DNA
atgtttgataaccttttgtttaacagtactctcaaat

SEQ ID NO: 25166 - DNA, 38 bp, synthetic construct
  misc_feature 1..38: note = Synthetic oligonucleotide
  source 1..38: mol_type = other DNA
atgtttgttacccctatgaatttacactactctcaaac

SEQ ID NO: 25167 - DNA, 38 bp, synthetic construct; identical to SEQ ID NO: 25166
  misc_feature 1..38: note = Synthetic oligonucleotide
  source 1..38: mol_type = other DNA

SEQ ID NO: 25168 - DNA, 38 bp, synthetic construct; identical to SEQ ID NO: 25166
  misc_feature 1..38: note = Synthetic oligonucleotide
  source 1..38: mol_type = other DNA

SEQ ID NO: 25169 - DNA, 38 bp, synthetic construct
  misc_feature 1..38: note = Synthetic oligonucleotide
  source 1..38: mol_type = other DNA
atgttttagttctctgatggatattgatagacttatac

SEQ ID NO: 25170 - DNA, 35 bp, synthetic construct
  misc_feature 1..35: note = Synthetic oligonucleotide
  source 1..35: mol_type = other DNA
attaagacctcttagaaattacactactctcaaac

SEQ ID NO: 25171 - DNA, 35 bp, synthetic construct; identical to SEQ ID NO: 25170
  misc_feature 1..35: note = Synthetic oligonucleotide
  source 1..35: mol_type = other DNA

SEQ ID NO: 25172 - DNA, 37 bp, synthetic construct
  misc_feature 1..37: note = Synthetic oligonucleotide
  source 1..37: mol_type = other DNA
attacaaaccctatcacgatgacctaacagatgaaac

SEQ ID NO: 25173 - DNA, 37 bp, synthetic construct; identical to SEQ ID NO: 25172
  misc_feature 1..37: note = Synthetic oligonucleotide
  source 1..37: mol_type = other DNA

SEQ ID NO: 25174 - DNA, 37 bp, synthetic construct; identical to SEQ ID NO: 25172
  misc_feature 1..37: note = Synthetic oligonucleotide
  source 1..37: mol_type = other DNA

SEQ ID NO: 25175 - DNA, 36 bp, synthetic construct
  misc_feature 1..36: note = Synthetic oligonucleotide
  source 1..36: mol_type = other DNA
attacacaaacaaaatatttaaatgtcgattgtaag

SEQ ID NO: 25176 - DNA, 36 bp, synthetic construct; identical to SEQ ID NO: 11182
  misc_feature 1..36: note = Synthetic oligonucleotide
  source 1..36: mol_type = other DNA

SEQ ID NO: 25177 - DNA, 36 bp, synthetic construct; identical to SEQ ID NO: 11182
  misc_feature 1..36: note = Synthetic oligonucleotide
  source 1..36: mol_type = other DNA

SEQ ID NO: 25178 - DNA, 19 bp, synthetic construct
  misc_feature 1..19: note = Synthetic oligonucleotide
  source 1..19: mol_type = other DNA
attacactactctcaaaca

SEQ ID NO: 25179 - DNA, 38 bp, synthetic construct
  misc_feature 1..38: note = Synthetic oligonucleotide
  source 1..38: mol_type = other DNA
attacagccgcgcgcgcggctgtggtcaacactgaaag

SEQ ID NO: 25180 - DNA, 19 bp, synthetic construct
  misc_feature 1..19: note = Synthetic oligonucleotide
  source 1..19: mol_type = other DNA
attacggtgcttccgaaac

SEQ ID NO: 25181 - DNA, 38 bp, synthetic construct
  misc_feature 1..38: note = Synthetic oligonucleotide
  source 1..38: mol_type = other DNA
attataaagcccgcgccgaacaaaacctagagtgaaag

SEQ ID NO: 25182 - DNA, 36 bp, synthetic construct; identical to SEQ ID NO: 11190
  misc_feature 1..36: note = Synthetic oligonucleotide
  source 1..36: mol_type = other DNA

SEQ ID NO: 25183 - DNA, 33 bp, synthetic construct
  misc_feature 1..33: note = Synthetic oligonucleotide
  source 1..33: mol_type = other DNA
attataacagctgattgaattgcaacgcactag

SEQ ID NO: 25184 - DNA, 36 bp, synthetic construct; identical to SEQ ID NO: 11192
  misc_feature 1..36: note = Synthetic oligonucleotide
  source 1..36: mol_type = other DNA

SEQ ID NO: 25185 - DNA, 36 bp, synthetic construct; identical to SEQ ID NO: 11194
  misc_feature 1..36: note = Synthetic oligonucleotide
  source 1..36: mol_type = other DNA

SEQ ID NO: 25186 - DNA, 36 bp, synthetic construct
  misc_feature 1..36: note = Synthetic oligonucleotide
  source 1..36: mol_type = other DNA
attataacataccaagaaaaaccagggaactacaac

SEQ ID NO: 25187 - DNA, 36 bp, synthetic construct
  misc_feature 1..36: note = Synthetic oligonucleotide
  source 1..36: mol_type = other DNA
attataacataccaagaaaaatcagggaactacaac

SEQ ID NO: 25188 - DNA, 36 bp, synthetic construct
  misc_feature 1..36: note = Synthetic oligonucleotide
  source 1..36: mol_type = other DNA
attataacataccaagaaaaattagggaactacaat

SEQ ID NO: 25189 - DNA, 36 bp, synthetic construct; identical to SEQ ID NO: 25188
  misc_feature 1..36: note = Synthetic oligonucleotide
  source 1..36: mol_type = other DNA

SEQ ID NO: 25190 - DNA, 25 bp, synthetic construct
  misc_feature 1..25: note = Synthetic oligonucleotide
  source 1..25: mol_type = other DNA
attataacataccaagaataaaaag

SEQ ID NO: 25191 - DNA, 26 bp, synthetic construct
  misc_feature 1..26: note = Synthetic oligonucleotide
  source 1..26: mol_type = other DNA
attataacataccaagaataaaaagg

SEQ ID NO: 25192 - DNA, 36 bp, synthetic construct
  misc_feature 1..36: note = Synthetic oligonucleotide
  source 1..36: mol_type = other DNA
attataacataccaagaataaaaagggaaatatgac

SEQ ID NO: 25193 - DNA, 36 bp, synthetic construct; identical to SEQ ID NO: 25192
  misc_feature 1..36: note = Synthetic oligonucleotide
  source 1..36: mol_type = other DNA

SEQ ID NO: 25194 - DNA, 36 bp, synthetic construct; identical to SEQ ID NO: 25192
  misc_feature 1..36: note = Synthetic oligonucleotide
  source 1..36: mol_type = other DNA

SEQ ID NO: 25195 - DNA, 36 bp, synthetic construct; identical to SEQ ID NO: 25192
  misc_feature 1..36: note = Synthetic oligonucleotide
  source 1..36: mol_type = other DNA

SEQ ID NO: 25196 - DNA, 36 bp, synthetic construct; identical to SEQ ID NO: 25192
  misc_feature 1..36: note = Synthetic oligonucleotide
  source 1..36: mol_type = other DNA

SEQ ID NO: 25197 - DNA, 37 bp, synthetic construct
  misc_feature 1..37: note = Synthetic oligonucleotide
  source 1..37: mol_type = other DNA
attataacatactaagactttgcggtcaatccgtaat

SEQ ID NO: 25198 - DNA, 36 bp, synthetic construct; identical to SEQ ID NO: 11202
  misc_feature 1..36: note = Synthetic oligonucleotide
  source 1..36: mol_type = other DNA

SEQ ID NO: 25199 - DNA, 36 bp, synthetic construct; identical to SEQ ID NO: 11202
  misc_feature 1..36: note = Synthetic oligonucleotide
  source 1..36: mol_type = other DNA

SEQ ID NO: 25200 - DNA, 36 bp, synthetic construct
  misc_feature 1..36: note = Synthetic oligonucleotide
  source 1..36: mol_type = other DNA
attataacctgcctgattttggattcaaggcaaaac

SEQ ID NO: 25201 - DNA, 36 bp, synthetic construct; identical to SEQ ID NO: 11206
  misc_feature 1..36: note = Synthetic oligonucleotide
  source 1..36: mol_type = other DNA

SEQ ID NO: 25202 - DNA, 36 bp, synthetic construct
  misc_feature 1..36: note = Synthetic oligonucleotide
  source 1..36: mol_type = other DNA
attataactgattaatttttctggtcaacctgcaac

SEQ ID NO: 25203 - DNA, 36 bp, synthetic construct; identical to SEQ ID NO: 11218
  misc_feature 1..36: note = Synthetic oligonucleotide
  source 1..36: mol_type = other DNA

SEQ ID NO: 25204 - DNA, 36 bp, synthetic construct; identical to SEQ ID NO: 11218
  misc_feature 1..36: note = Synthetic oligonucleotide
  source 1..36: mol_type = other DNA

SEQ ID NO: 25205 - DNA, 36 bp, synthetic construct; identical to SEQ ID NO: 11222
  misc_feature 1..36: note = Synthetic oligonucleotide
  source 1..36: mol_type = other DNA

SEQ ID NO: 25206 - DNA, 36 bp, synthetic construct
  misc_feature 1..36: note = Synthetic oligonucleotide
  source 1..36: mol_type = other DNA
attatacagtattcttgcttttagtgggagtataac

SEQ ID NO: 25207 - DNA, 36 bp, synthetic construct
  misc_feature 1..36: note = Synthetic oligonucleotide
  source 1..36: mol_type = other DNA
attataccaaacaaatgcctgcccgcaaaccacaac

SEQ ID NO: 25208 - DNA, 36 bp, synthetic construct
  misc_feature 1..36: note = Synthetic oligonucleotide
  source 1..36: mol_type = other DNA
attataccaaatggggatttgagagtaggttaaagt

SEQ ID NO: 25209 - DNA, 36 bp, synthetic construct
  misc_feature 1..36: note = Synthetic oligonucleotide
  source 1..36: mol_type = other DNA
attataccaagacctgatctgtaagggagctataac

SEQ ID NO: 25210 - DNA, 36 bp, synthetic construct; identical to SEQ ID NO: 11227
  misc_feature 1..36: note = Synthetic oligonucleotide
  source 1..36: mol_type = other DNA

SEQ ID NO: 25211 - DNA, 36 bp, synthetic construct; identical to SEQ ID NO: 11227
  misc_feature 1..36: note = Synthetic oligonucleotide
  source 1..36: mol_type = other DNA

SEQ ID NO: 25212 - DNA, 36 bp, synthetic construct; identical to SEQ ID NO: 11227
  misc_feature 1..36: note = Synthetic oligonucleotide
  source 1..36: mol_type = other DNA

SEQ ID NO: 25213 - DNA, 36 bp, synthetic construct; identical to SEQ ID NO: 11227
  misc_feature 1..36: note = Synthetic oligonucleotide
  source 1..36: mol_type = other DNA

SEQ ID NO: 25214 - DNA, 36 bp, synthetic construct; identical to SEQ ID NO: 11227
  misc_feature 1..36: note = Synthetic oligonucleotide
  source 1..36: mol_type = other DNA

SEQ ID NO: 25215 - DNA, 36 bp, synthetic construct; identical to SEQ ID NO: 11227
  misc_feature 1..36: note = Synthetic oligonucleotide
  source 1..36: mol_type = other DNA

SEQ ID NO: 25216 - DNA, 36 bp, synthetic construct; identical to SEQ ID NO: 11227
  misc_feature 1..36: note = Synthetic oligonucleotide
  source 1..36: mol_type = other DNA

SEQ ID NO: 25217 - DNA, 36 bp, synthetic construct; identical to SEQ ID NO: 11227
  misc_feature 1..36: note = Synthetic oligonucleotide
  source 1..36: mol_type = other DNA

SEQ ID NO: 25218 - DNA, 36 bp, synthetic construct; identical to SEQ ID NO: 11227
  misc_feature 1..36: note = Synthetic oligonucleotide
  source 1..36: mol_type = other DNA

SEQ ID NO: 25219 - DNA, 36 bp, synthetic construct; identical to SEQ ID NO: 11227
  misc_feature 1..36: note = Synthetic oligonucleotide
  source 1..36: mol_type = other DNA

SEQ ID NO: 25220 - DNA, 36 bp, synthetic construct; identical to SEQ ID NO: 11227
  misc_feature 1..36: note = Synthetic oligonucleotide
  source 1..36: mol_type = other DNA

SEQ ID NO: 25221 - DNA, 36 bp, synthetic construct; identical to SEQ ID NO: 11227
  misc_feature 1..36: note = Synthetic oligonucleotide
  source 1..36: mol_type = other DNA

SEQ ID NO: 25222 - DNA, 36 bp, synthetic construct; identical to SEQ ID NO: 11227
  misc_feature 1..36: note = Synthetic oligonucleotide
  source 1..36: mol_type = other DNA

SEQ ID NO: 25223 - DNA, 36 bp, synthetic construct; identical to SEQ ID NO: 11227
  misc_feature 1..36: note = Synthetic oligonucleotide
  source 1..36: mol_type = other DNA

SEQ ID NO: 25224 - DNA, 37 bp, synthetic construct
  misc_feature 1..37: note = Synthetic oligonucleotide
  source 1..37: mol_type = other DNA
attataccaatatctaaattgttagggaactataact

SEQ ID NO: 25225 - DNA, 36 bp, synthetic construct
  misc_feature 1..36: note = Synthetic oligonucleotide
  source 1..36: mol_type = other DNA
attataccacaacaagaaacatcagggaactacaac

SEQ ID NO: 25226 - DNA, 36 bp, synthetic construct
  misc_feature 1..36: note = Synthetic oligonucleotide
  source 1..36: mol_type = other DNA
attataccacagcgataatctcaggggaactatgac

SEQ ID NO: 25227 - DNA, 36 bp, synthetic construct; identical to SEQ ID NO: 11231
  misc_feature 1..36: note = Synthetic oligonucleotide
  source 1..36: mol_type = other DNA

SEQ ID NO: 25228 - DNA, 36 bp, synthetic construct
  misc_feature 1..36: note = Synthetic oligonucleotide
  source 1..36: mol_type = other DNA
attataccactaccaaatctgtaagggagctataac

SEQ ID NO: 25229 - DNA, 36 bp, synthetic construct; identical to SEQ ID NO: 25228
  misc_feature 1..36: note = Synthetic oligonucleotide
  source 1..36: mol_type = other DNA

SEQ ID NO: 25230 - DNA, 36 bp, synthetic construct
  misc_feature 1..36: note = Synthetic oligonucleotide
  source 1..36: mol_type = other DNA
attataccactacgagagaaaacagggaactacgac

SEQ ID NO: 25231 - DNA, 36 bp, synthetic construct; identical to SEQ ID NO: 25230
  misc_feature 1..36: note = Synthetic oligonucleotide
  source 1..36: mol_type = other DNA

SEQ ID NO: 25232 - DNA, 36 bp, synthetic construct; identical to SEQ ID NO: 25230
  misc_feature 1..36: note = Synthetic oligonucleotide
  source 1..36: mol_type = other DNA

SEQ ID NO: 25233 - DNA, 36 bp, synthetic construct; identical to SEQ ID NO: 25230
  misc_feature 1..36: note = Synthetic oligonucleotide
  source 1..36: mol_type = other DNA

SEQ ID NO: 25234 - DNA, 36 bp, synthetic construct; identical to SEQ ID NO: 11236
  misc_feature 1..36: note = Synthetic oligonucleotide
  source 1..36: mol_type = other DNA

SEQ ID NO: 25235 - DNA, 36 bp, synthetic construct; identical to SEQ ID NO: 11236
  misc_feature 1..36: note = Synthetic oligonucleotide
  source 1..36: mol_type = other DNA

SEQ ID NO: 25236 - DNA, 36 bp, synthetic construct; identical to SEQ ID NO: 11236
  misc_feature 1..36: note = Synthetic oligonucleotide
  source 1..36: mol_type = other DNA

SEQ ID NO: 25237 - DNA, 23 bp, synthetic construct
  misc_feature 1..23: note = Synthetic oligonucleotide
  source 1..23: mol_type = other DNA
attataccactacgagagaaaat

SEQ ID NO: 25238 - DNA, 36 bp, synthetic construct
  misc_feature 1..36: note = Synthetic oligonucleotide
  source 1..36: mol_type = other DNA
attataccactacgagagaaaattgggaactacgac

SEQ ID NO: 25239 - DNA, 36 bp, synthetic construct; identical to SEQ ID NO: 25238
  misc_feature 1..36: note = Synthetic oligonucleotide
  source 1..36: mol_type = other DNA

SEQ ID NO: 25240 - DNA, 36 bp, synthetic construct; identical to SEQ ID NO: 25238
  misc_feature 1..36: note = Synthetic oligonucleotide
  source 1..36: mol_type = other DNA

SEQ ID NO: 25241 - DNA, 36 bp, synthetic construct; identical to SEQ ID NO: 25238
  misc_feature 1..36: note = Synthetic oligonucleotide
  source 1..36: mol_type = other DNA

SEQ ID NO: 25242 - DNA, 36 bp, synthetic construct; identical to SEQ ID NO: 25238
  misc_feature 1..36: note = Synthetic oligonucleotide
  source 1..36: mol_type = other DNA

SEQ ID NO: 25243 - DNA, 36 bp, synthetic construct; identical to SEQ ID NO: 25238
  misc_feature 1..36: note = Synthetic oligonucleotide
  source 1..36: mol_type = other DNA

SEQ ID NO: 25244 - DNA, 36 bp, synthetic construct; identical to SEQ ID NO: 25238
  misc_feature 1..36: note = Synthetic oligonucleotide
  source 1..36: mol_type = other DNA

SEQ ID NO: 25245 - DNA, 36 bp, synthetic construct; identical to SEQ ID NO: 25238
  misc_feature 1..36: note = Synthetic oligonucleotide
  source 1..36: mol_type = other DNA

SEQ ID NO: 25246 - DNA, 36 bp, synthetic construct; identical to SEQ ID NO: 25238
  misc_feature 1..36: note = Synthetic oligonucleotide
  source 1..36: mol_type = other DNA

SEQ ID NO: 25247 - DNA, 36 bp, synthetic construct; identical to SEQ ID NO: 25238
  misc_feature 1..36: note = Synthetic oligonucleotide
  source 1..36: mol_type = other DNA

SEQ ID NO: 25248 - DNA, 36 bp, synthetic construct; identical to SEQ ID NO: 25238
  misc_feature 1..36: note = Synthetic oligonucleotide
  source 1..36: mol_type = other DNA

SEQ ID NO: 25249 - DNA, 36 bp, synthetic construct
  misc_feature 1..36: note = Synthetic oligonucleotide
  source 1..36: mol_type = other DNA
attataccactacgagagaaaattgggagctacgac

SEQ ID NO: 25250 - DNA, 36 bp, synthetic construct
  misc_feature 1..36: note = Synthetic oligonucleotide
  source 1..36: mol_type = other DNA
attataccactacgagaggaaattgggaactacgac

SEQ ID NO: 25251 - DNA, 36 bp, synthetic construct
  misc_feature 1..36: note = Synthetic oligonucleotide
  source 1..36: mol_type = other DNA
attataccagaaacgtattggtaaggcctctattgc

SEQ ID NO: 25252 - DNA, 37 bp, synthetic construct
  misc_feature 1..37: note = Synthetic oligonucleotide
  source 1..37: mol_type = other DNA
attataccagaacgaaaattcctgtcaagccccagca

SEQ ID NO: 25253 - DNA, 37 bp, synthetic construct; identical to SEQ ID NO: 11239
  misc_feature 1..37: note = Synthetic oligonucleotide
  source 1..37: mol_type = other DNA

SEQ ID NO: 25254 - DNA, 36 bp, synthetic construct
  misc_feature 1..36: note = Synthetic oligonucleotide
  source 1..36: mol_type = other DNA
attataccataccaaaaatcaatagggaactaaaac

SEQ ID NO: 25255 - DNA, 36 bp, synthetic construct; identical to SEQ ID NO: 11241
  misc_feature 1..36: note = Synthetic oligonucleotide
  source 1..36: mol_type = other DNA

SEQ ID NO: 25256 - DNA, 36 bp, synthetic construct; identical to SEQ ID NO: 11241
  misc_feature 1..36: note = Synthetic oligonucleotide
  source 1..36: mol_type = other DNA

SEQ ID NO: 25257 - DNA, 36 bp, synthetic construct; identical to SEQ ID NO: 11241
  misc_feature 1..36: note = Synthetic oligonucleotide
  source 1..36: mol_type = other DNA

SEQ ID NO: 25258 - DNA, 36 bp, synthetic construct; identical to SEQ ID NO: 11241
  misc_feature 1..36: note = Synthetic oligonucleotide
  source 1..36: mol_type = other DNA

SEQ ID NO: 25259 - DNA, 36 bp, synthetic construct; identical to SEQ ID NO: 11241
  misc_feature 1..36: note = Synthetic oligonucleotide
  source 1..36: mol_type = other DNA

SEQ ID NO: 25260 - DNA, 37 bp, synthetic construct
  misc_feature 1..37: note = Synthetic oligonucleotide
  source 1..37: mol_type = other DNA
attataccataccaaaaattaaaagggaactaaaaca

SEQ ID NO: 25261 - DNA, 37 bp, synthetic construct
  misc_feature 1..37: note = Synthetic oligonucleotide
  source 1..37: mol_type = other DNA
attataccataccaaaaattaaaagggaactaaaacg

SEQ ID NO: 25262 - DNA, 36 bp, synthetic construct
  misc_feature 1..36: note = Synthetic oligonucleotide
  source 1..36: mol_type = other DNA
attataccataccaaaactcattagggaactaaaac

SEQ ID NO: 25263 - DNA, 35 bp, synthetic construct
  misc_feature 1..35: note = Synthetic oligonucleotide
  source 1..35: mol_type = other DNA
attataccataccaaaatctaaaacggaactaaaa

SEQ ID NO: 25264 - DNA, 36 bp, synthetic construct
  misc_feature 1..36: note = Synthetic oligonucleotide
  source 1..36: mol_type = other DNA
attataccataccaagaaataatagggaactacagc

SEQ ID NO: 25265 - DNA, 36 bp, synthetic construct; identical to SEQ ID NO: 25264
  misc_feature 1..36: note = Synthetic oligonucleotide
  source 1..36: mol_type = other DNA

SEQ ID NO: 25266 - DNA, 36 bp, synthetic construct; identical to SEQ ID NO: 25264
  misc_feature 1..36: note = Synthetic oligonucleotide
  source 1..36: mol_type = other DNA

SEQ ID NO: 25267 - DNA, 36 bp, synthetic construct; identical to SEQ ID NO: 25264
  misc_feature 1..36: note = Synthetic oligonucleotide
  source 1..36: mol_type = other DNA

SEQ ID NO: 25268 - DNA, 36 bp, synthetic construct; identical to SEQ ID NO: 25264
  misc_feature 1..36: note = Synthetic oligonucleotide
  source 1..36: mol_type = other DNA

SEQ ID NO: 25269 - DNA, 36 bp, synthetic construct
  misc_feature 1..36: note = Synthetic oligonucleotide
  source 1..36: mol_type = other DNA
attataccataccaagaaccaccggagaactacaac

SEQ ID NO: 25270 - DNA, 36 bp, synthetic construct
  misc_feature 1..36: note = Synthetic oligonucleotide
  source 1..36: mol_type = other DNA
attataccataccaagaaccaccggggaactacaac

SEQ ID NO: 25271 - DNA, 36 bp, synthetic construct; identical to SEQ ID NO: 25270
  misc_feature 1..36: note = Synthetic oligonucleotide
  source 1..36: mol_type = other DNA

SEQ ID NO: 25272 - DNA, 36 bp, synthetic construct; identical to SEQ ID NO: 25270
  misc_feature 1..36: note = Synthetic oligonucleotide
  source 1..36: mol_type = other DNA

SEQ ID NO: 25273 - DNA, 36 bp, synthetic construct; identical to SEQ ID NO: 25270
  misc_feature 1..36: note = Synthetic oligonucleotide
  source 1..36: mol_type = other DNA

SEQ ID NO: 25274 - DNA, 36 bp, synthetic construct; identical to SEQ ID NO: 25270
  misc_feature 1..36: note = Synthetic oligonucleotide
  source 1..36: mol_type = other DNA

SEQ ID NO: 25275 - DNA, 37 bp, synthetic construct
  misc_feature 1..37: note = Synthetic oligonucleotide
  source 1..37: mol_type = other DNA
attataccataccaagaaccaccggggaactacaact

SEQ ID NO: 25276 - DNA, 37 bp, synthetic construct
  misc_feature 1..37: note = Synthetic oligonucleotide
  source 1..37: mol_type = other DNA
attataccataccaagaaccatcagggaactacaact

SEQ ID NO: 25277 - DNA, 36 bp, synthetic construct
  misc_feature 1..36: note = Synthetic oligonucleotide
  source 1..36: mol_type = other DNA
attataccataccaagaacgatcagggaactacaac

SEQ ID NO: 25278 - DNA, 36 bp, synthetic construct
  misc_feature 1..36: note = Synthetic oligonucleotide
  source 1..36: mol_type = other DNA
attataccataccaagaacgatcagggaactataac

SEQ ID NO: 25279 - DNA, 36 bp, synthetic construct
  misc_feature 1..36: note = Synthetic oligonucleotide
  source 1..36: mol_type = other DNA
attataccataccaagaactaccagggaaatataac

SEQ ID NO: 25280 - DNA, 36 bp, synthetic construct
  misc_feature 1..36: note = Synthetic oligonucleotide
  source 1..36: mol_type = other DNA
attataccataccaagaactaccagggaactacaac

SEQ ID NO: 25281 - DNA, 36 bp, synthetic construct; identical to SEQ ID NO: 25280
  misc_feature 1..36: note = Synthetic oligonucleotide
  source 1..36: mol_type = other DNA

SEQ ID NO: 25282 - DNA, 36 bp, synthetic construct
  misc_feature 1..36: note = Synthetic oligonucleotide
  source 1..36: mol_type = other DNA
attataccataccaagaactaccggggaactacaac

SEQ ID NO: 25283 - DNA, 27 bp, synthetic construct
  misc_feature 1..27: note = Synthetic oligonucleotide
  source 1..27: mol_type = other DNA
attataccataccaagaactatcaggg

SEQ ID NO: 25284 - DNA, 27 bp, synthetic construct
  misc_feature 1..27: note = Synthetic oligonucleotide
  source 1..27: mol_type = other DNA
attataccataccaagaactatcaggg

SEQ ID NO: 25285 - DNA, 36 bp, synthetic construct; identical to SEQ ID NO: 11252
  misc_feature 1..36: note = Synthetic oligonucleotide
  source 1..36: mol_type = other DNA

SEQ ID NO: 25286 - DNA, 36 bp, synthetic construct; identical to SEQ ID NO: 11252
  misc_feature 1..36: note = Synthetic oligonucleotide
  source 1..36: mol_type = other DNA

SEQ ID NO: 25287 - DNA, 36 bp, synthetic construct; identical to SEQ ID NO: 11252
  misc_feature 1..36: note = Synthetic oligonucleotide
  source 1..36: mol_type = other DNA

SEQ ID NO: 25288 - DNA, 36 bp, synthetic construct; identical to SEQ ID NO: 11252
  misc_feature 1..36: note = Synthetic oligonucleotide
  source 1..36: mol_type = other DNA

SEQ ID NO: 25289 - DNA, 36 bp, synthetic construct; identical to SEQ ID NO: 11252
  misc_feature 1..36: note = Synthetic oligonucleotide
  source 1..36: mol_type = other DNA

SEQ ID NO: 25290 - DNA, 36 bp, synthetic construct; identical to SEQ ID NO: 11252
  misc_feature 1..36: note = Synthetic oligonucleotide
  source 1..36: mol_type = other DNA

SEQ ID NO: 25291 - DNA, 35 bp, synthetic construct
  misc_feature 1..35: note = Synthetic oligonucleotide
  source 1..35: mol_type = other DNA
attataccataccaagaactatcagggggctacaa

SEQ ID NO: 25292 - DNA, 36 bp, synthetic construct
  misc_feature 1..36: note = Synthetic oligonucleotide
  source 1..36: mol_type = other DNA
attataccataccaagaactgttagggaactacaac

SEQ ID NO: 25293 - DNA, 36 bp, synthetic construct; identical to SEQ ID NO: 25292
  misc_feature 1..36: note = Synthetic oligonucleotide
  source 1..36: mol_type = other DNA

SEQ ID NO: 25294 - DNA, 36 bp, synthetic construct; identical to SEQ ID NO: 25292
  misc_feature 1..36: note = Synthetic oligonucleotide
  source 1..36: mol_type = other DNA

SEQ ID NO: 25295 - DNA, 36 bp, synthetic construct; identical to SEQ ID NO: 25292
  misc_feature 1..36: note = Synthetic oligonucleotide
  source 1..36: mol_type = other DNA

SEQ ID NO: 25296 - DNA, 36 bp, synthetic construct; identical to SEQ ID NO: 25292
  misc_feature 1..36: note = Synthetic oligonucleotide
  source 1..36: mol_type = other DNA

SEQ ID NO: 25297 - DNA, 36 bp, synthetic construct; identical to SEQ ID NO: 25292
  misc_feature 1..36: note = Synthetic oligonucleotide
  source 1..36: mol_type = other DNA

SEQ ID NO: 25298 - DNA, 36 bp, synthetic construct; identical to SEQ ID NO: 25292
  misc_feature 1..36: note = Synthetic oligonucleotide
  source 1..36: mol_type = other DNA

SEQ ID NO: 25299 - DNA, 36 bp, synthetic construct; identical to SEQ ID NO: 25292
  misc_feature 1..36: note = Synthetic oligonucleotide
  source 1..36: mol_type = other DNA

SEQ ID NO: 25300 - DNA, 36 bp, synthetic construct; identical to SEQ ID NO: 25292
  misc_feature 1..36: note = Synthetic oligonucleotide
  source 1..36: mol_type = other DNA

SEQ ID NO: 25301 - DNA, 36 bp, synthetic construct; identical to SEQ ID NO: 25292
  misc_feature 1..36: note = Synthetic oligonucleotide
  source 1..36: mol_type = other DNA

SEQ ID NO: 25302 - DNA, 36 bp, synthetic construct; identical to SEQ ID NO: 25292
  misc_feature 1..36: note = Synthetic oligonucleotide
  source 1..36: mol_type = other DNA

SEQ ID NO: 25303 - DNA, 36 bp, synthetic construct; identical to SEQ ID NO: 25292
  misc_feature 1..36: note = Synthetic oligonucleotide
  source 1..36: mol_type = other DNA

SEQ ID NO: 25304 - DNA, 36 bp, synthetic construct; identical to SEQ ID NO: 25292
  misc_feature 1..36: note = Synthetic oligonucleotide
  source 1..36: mol_type = other DNA

SEQ ID NO: 25305 - DNA, 36 bp, synthetic construct; identical to SEQ ID NO: 25292
  misc_feature 1..36: note = Synthetic oligonucleotide
  source 1..36: mol_type = other DNA

SEQ ID NO: 25306 - DNA, 36 bp, synthetic construct
  misc_feature 1..36: note = Synthetic oligonucleotide
  source 1..36: mol_type = other DNA
attataccataccaagaataattagggaactacaac

SEQ ID NO: 25307 - DNA, 26 bp, synthetic construct
  misc_feature 1..26: note = Synthetic oligonucleotide
  source 1..26: mol_type = other DNA
attataccataccaagagctattagg

SEQ ID NO: 25308 - DNA, 36 bp, synthetic construct
  misc_feature 1..36: note = Synthetic oligonucleotide
  source 1..36: mol_type = other DNA
attataccataccaagagctattagggaacgatgac

SEQ ID NO: 25309 - DNA, 36 bp, synthetic construct; identical to SEQ ID NO: 25308
  misc_feature 1..36: note = Synthetic oligonucleotide
  source 1..36: mol_type = other DNA

SEQ ID NO: 25310 - DNA, 36 bp, synthetic construct; identical to SEQ ID NO: 11257
  misc_feature 1..36: note = Synthetic oligonucleotide
  source 1..36: mol_type = other DNA

SEQ ID NO: 25311 - DNA, 36 bp, synthetic construct; identical to SEQ ID NO: 11257
  misc_feature 1..36: note = Synthetic oligonucleotide
  source 1..36: mol_type = other DNA

SEQ ID NO: 25312 - DNA, 36 bp, synthetic construct; identical to SEQ ID NO: 11257
  misc_feature 1..36: note = Synthetic oligonucleotide
  source 1..36: mol_type = other DNA

SEQ ID NO: 25313 - DNA, 36 bp, synthetic construct; identical to SEQ ID NO: 11257
  misc_feature 1..36: note = Synthetic oligonucleotide
  source 1..36: mol_type = other DNA

SEQ ID NO: 25314 - DNA, 36 bp, synthetic construct; identical to SEQ ID NO: 11257
  misc_feature 1..36: note = Synthetic oligonucleotide
  source 1..36: mol_type = other DNA

SEQ ID NO: 25315 - DNA, 36 bp, synthetic construct; identical to SEQ ID NO: 11257
  misc_feature 1..36: note = Synthetic oligonucleotide
  source 1..36: mol_type = other DNA

SEQ ID NO: 25316 - DNA, 36 bp, synthetic construct; identical to SEQ ID NO: 11257
  misc_feature 1..36: note = Synthetic oligonucleotide
  source 1..36: mol_type = other DNA

SEQ ID NO: 25317 - DNA, 36 bp, synthetic construct; identical to SEQ ID NO: 11257
  misc_feature 1..36: note = Synthetic oligonucleotide
  source 1..36: mol_type = other DNA

SEQ ID NO: 25318 - DNA, 36 bp, synthetic construct; identical to SEQ ID NO: 11257
  misc_feature 1..36: note = Synthetic oligonucleotide
  source 1..36: mol_type = other DNA

SEQ ID NO: 25319 - DNA, 36 bp, synthetic construct; identical to SEQ ID NO: 11257
  misc_feature 1..36: note = Synthetic oligonucleotide
  source 1..36: mol_type = other DNA

SEQ ID NO: 25320 - DNA, 36 bp, synthetic construct; identical to SEQ ID NO: 11257
  misc_feature 1..36: note = Synthetic oligonucleotide
  source 1..36: mol_type = other DNA

SEQ ID NO: 25321 - DNA, 36 bp, synthetic construct; identical to SEQ ID NO: 11257
  misc_feature 1..36: note = Synthetic oligonucleotide
  source 1..36: mol_type = other DNA

SEQ ID NO: 25322 - DNA, 36 bp, synthetic construct; identical to SEQ ID NO: 11257
  misc_feature 1..36: note = Synthetic oligonucleotide
  source 1..36: mol_type = other DNA

SEQ ID NO: 25323 - DNA, 36 bp, synthetic construct; identical to SEQ ID NO: 11257
  misc_feature 1..36: note = Synthetic oligonucleotide
  source 1..36: mol_type = other DNA

SEQ ID NO: 25324 - DNA, 36 bp, synthetic construct; identical to SEQ ID NO: 11257
  misc_feature 1..36: note = Synthetic oligonucleotide
  source 1..36: mol_type = other DNA

SEQ ID NO: 25325 - DNA, 36 bp, synthetic construct; identical to SEQ ID NO: 11257
  misc_feature 1..36: note = Synthetic oligonucleotide
  source 1..36: mol_type = other DNA

SEQ ID NO: 25326 - DNA, 36 bp, synthetic construct; identical to SEQ ID NO: 11257
  misc_feature 1..36: note = Synthetic oligonucleotide
  source 1..36: mol_type = other DNA

SEQ ID NO: 25327 - DNA, 36 bp, synthetic construct; identical to SEQ ID NO: 11257
  misc_feature 1..36: note = Synthetic oligonucleotide
  source 1..36: mol_type = other DNA

SEQ ID NO: 25328 - DNA, 36 bp, synthetic construct; identical to SEQ ID NO: 11257
  misc_feature 1..36: note = Synthetic oligonucleotide
  source 1..36: mol_type = other DNA

SEQ ID NO: 25329 - DNA, 36 bp, synthetic construct; identical to SEQ ID NO: 11257
  misc_feature 1..36: note = Synthetic oligonucleotide
  source 1..36: mol_type = other DNA

SEQ ID NO: 25330 - DNA, 36 bp, synthetic construct; identical to SEQ ID NO: 11257
  misc_feature 1..36: note = Synthetic oligonucleotide
  source 1..36: mol_type = other DNA

SEQ ID NO: 25331 - DNA, 36 bp, synthetic construct; identical to SEQ ID NO: 11257
  misc_feature 1..36: note = Synthetic oligonucleotide
  source 1..36: mol_type = other DNA

SEQ ID NO: 25332 - DNA, 36 bp, synthetic construct; identical to SEQ ID NO: 11257
  misc_feature 1..36: note = Synthetic oligonucleotide
  source 1..36: mol_type = other DNA

SEQ ID NO: 25333 - DNA, 36 bp, synthetic construct; identical to SEQ ID NO: 11257
  misc_feature 1..36: note = Synthetic oligonucleotide
  source 1..36: mol_type = other DNA

SEQ ID NO: 25334 - DNA, 36 bp, synthetic construct; identical to SEQ ID NO: 11257
  misc_feature 1..36: note = Synthetic oligonucleotide
  source 1..36: mol_type = other DNA

SEQ ID NO: 25335 - DNA, 36 bp, synthetic construct; identical to SEQ ID NO: 11257
  misc_feature 1..36: note = Synthetic oligonucleotide
  source 1..36: mol_type = other DNA

SEQ ID NO: 25336 - DNA, 36 bp, synthetic construct; identical to SEQ ID NO: 11257
  misc_feature 1..36: note = Synthetic oligonucleotide
  source 1..36: mol_type = other DNA

SEQ ID NO: 25337 - DNA, 36 bp, synthetic construct; identical to SEQ ID NO: 11257
  misc_feature 1..36: note = Synthetic oligonucleotide
  source 1..36: mol_type = other DNA

SEQ ID NO: 25338 - DNA, 36 bp, synthetic construct; identical to SEQ ID NO: 11257
  misc_feature 1..36: note = Synthetic oligonucleotide
  source 1..36: mol_type = other DNA

SEQ ID NO: 25339 - DNA, 36 bp, synthetic construct; identical to SEQ ID NO: 11257
  misc_feature 1..36: note = Synthetic oligonucleotide
  source 1..36: mol_type = other DNA

SEQ ID NO: 25340 - DNA, 36 bp, synthetic construct; identical to SEQ ID NO: 11257
  misc_feature 1..36: note = Synthetic oligonucleotide
  source 1..36: mol_type = other DNA

SEQ ID NO: 25341 - DNA, 36 bp, synthetic construct; identical to SEQ ID NO: 11257
  misc_feature 1..36: note = Synthetic oligonucleotide
  source 1..36: mol_type = other DNA

SEQ ID NO: 25342 - DNA, 36 bp, synthetic construct; identical to SEQ ID NO: 11257
  misc_feature 1..36: note = Synthetic oligonucleotide
  source 1..36: mol_type = other DNA

SEQ ID NO: 25343 - DNA, 36 bp, synthetic construct; identical to SEQ ID NO: 11257
  misc_feature 1..36: note = Synthetic oligonucleotide
  source 1..36: mol_type = other DNA

SEQ ID NO: 25344 - DNA, 36 bp, synthetic construct; identical to SEQ ID NO: 11257
  misc_feature 1..36: note = Synthetic oligonucleotide
  source 1..36: mol_type = other DNA

SEQ ID NO: 25345 - DNA, 36 bp, synthetic construct; identical to SEQ ID NO: 11257
  misc_feature 1..36: note = Synthetic oligonucleotide
  source 1..36: mol_type = other DNA

SEQ ID NO: 25346 - DNA, 36 bp, synthetic construct; identical to SEQ ID NO: 11257
  misc_feature 1..36: note = Synthetic oligonucleotide
  source 1..36: mol_type = other DNA

SEQ ID NO: 25347 - DNA, 36 bp, synthetic construct; identical to SEQ ID NO: 11257
  misc_feature 1..36: note = Synthetic oligonucleotide
  source 1..36: mol_type = other DNA

SEQ ID NO: 25348 - DNA, 36 bp, synthetic construct; identical to SEQ ID NO: 11257
  misc_feature 1..36: note = Synthetic oligonucleotide
  source 1..36: mol_type = other DNA

SEQ ID NO: 25349 - DNA, 36 bp, synthetic construct; identical to SEQ ID NO: 11257
  misc_feature 1..36: note = Synthetic oligonucleotide
  source 1..36: mol_type = other DNA

SEQ ID NO: 25350 - DNA, 36 bp, synthetic construct; identical to SEQ ID NO: 11257
  misc_feature 1..36: note = Synthetic oligonucleotide
  source 1..36: mol_type = other DNA

SEQ ID NO: 25351 - DNA, 36 bp, synthetic construct; identical to SEQ ID NO: 11257
  misc_feature 1..36: note = Synthetic oligonucleotide
  source 1..36: mol_type = other DNA

SEQ ID NO: 25352 - DNA, 36 bp, synthetic construct; identical to SEQ ID NO: 11257
  misc_feature 1..36: note = Synthetic oligonucleotide
  source 1..36: mol_type = other DNA

SEQ ID NO: 25353 - DNA, 36 bp, synthetic construct; identical to SEQ ID NO: 11257
  misc_feature 1..36: note = Synthetic oligonucleotide
  source 1..36: mol_type = other DNA

SEQ ID NO: 25354 - DNA, 36 bp, synthetic construct; identical to SEQ ID NO: 11257
  misc_feature 1..36: note = Synthetic oligonucleotide
  source 1..36: mol_type = other DNA

SEQ ID NO: 25355 - DNA, 36 bp, synthetic construct; identical to SEQ ID NO: 11257
  misc_feature 1..36: note = Synthetic oligonucleotide
  source 1..36: mol_type = other DNA

SEQ ID NO: 25356 - DNA, 36 bp, synthetic construct; identical to SEQ ID NO: 11257
  misc_feature 1..36: note = Synthetic oligonucleotide
  source 1..36: mol_type = other DNA

SEQ ID NO: 25357 - DNA, 36 bp, synthetic construct; identical to SEQ ID NO: 11257
  misc_feature 1..36: note = Synthetic oligonucleotide
  source 1..36: mol_type = other DNA

SEQ ID NO: 25358 - DNA, 36 bp, synthetic construct; identical to SEQ ID NO: 11257
  misc_feature 1..36: note = Synthetic oligonucleotide
  source 1..36: mol_type = other DNA

SEQ ID NO: 25359 - DNA, 36 bp, synthetic construct; identical to SEQ ID NO: 11257
  misc_feature 1..36: note = Synthetic oligonucleotide
  source 1..36: mol_type = other DNA

SEQ ID NO: 25360 - DNA, 36 bp, synthetic construct; identical to SEQ ID NO: 11257
  misc_feature 1..36: note = Synthetic oligonucleotide
  source 1..36: mol_type = other DNA

SEQ ID NO: 25361 - DNA, 36 bp, synthetic construct; identical to SEQ ID NO: 11257
  misc_feature 1..36: note = Synthetic oligonucleotide
  source 1..36: mol_type = other DNA

SEQ ID NO: 25362 - DNA, 36 bp, synthetic construct; identical to SEQ ID NO: 11257
  misc_feature 1..36: note = Synthetic oligonucleotide
  source 1..36: mol_type = other DNA

SEQ ID NO: 25363 - DNA, 36 bp, synthetic construct; identical to SEQ ID NO: 11257
  misc_feature 1..36: note = Synthetic oligonucleotide
  source 1..36: mol_type = other DNA

SEQ ID NO: 25364 - DNA, 36 bp, synthetic construct; identical to SEQ ID NO: 11257
  misc_feature 1..36: note = Synthetic oligonucleotide
  source 1..36: mol_type = other DNA

SEQ ID NO: 25365 - DNA, 36 bp, synthetic construct; identical to SEQ ID NO: 11257
  misc_feature 1..36: note = Synthetic oligonucleotide
  source 1..36: mol_type = other DNA

SEQ ID NO: 25366 - DNA, 36 bp, synthetic construct; identical to SEQ ID NO: 11257
  misc_feature 1..36: note = Synthetic oligonucleotide
  source 1..36: mol_type = other DNA

SEQ ID NO: 25367 - DNA, 36 bp, synthetic construct; identical to SEQ ID NO: 11257
  misc_feature 1..36: note = Synthetic oligonucleotide
  source 1..36: mol_type = other DNA

SEQ ID NO: 25368 - DNA, 36 bp, synthetic construct; identical to SEQ ID NO: 11257
  misc_feature 1..36: note = Synthetic oligonucleotide
  source 1..36: mol_type = other DNA

SEQ ID NO: 25369 - DNA, 36 bp, synthetic construct; identical to SEQ ID NO: 11257
  misc_feature 1..36: note = Synthetic oligonucleotide
  source 1..36: mol_type = other DNA

SEQ ID NO: 25370 - DNA, 36 bp, synthetic construct; identical to SEQ ID NO: 11257
  misc_feature 1..36: note = Synthetic oligonucleotide
  source 1..36: mol_type = other DNA

SEQ ID NO: 25371 - DNA, 35 bp, synthetic construct
  misc_feature 1..35: note = Synthetic oligonucleotide
  source 1..35: mol_type = other DNA
attataccataccaaggactaccagggaactacaa

SEQ ID NO: 25372 - DNA, 36 bp, synthetic construct
  misc_feature 1..36: note = Synthetic oligonucleotide
  source 1..36: mol_type = other DNA
attataccataccaagtaataaccgggaactacgac

SEQ ID NO: 25373 - DNA, 36 bp, synthetic construct
  misc_feature 1..36: note = Synthetic oligonucleotide
  source 1..36: mol_type = other DNA
attataccataccaagtgataacagggaattacaac

SEQ ID NO: 25374 - DNA, 36 bp, synthetic construct; identical to SEQ ID NO: 25373
  misc_feature 1..36: note = Synthetic oligonucleotide
  source 1..36: mol_type = other DNA

SEQ ID NO: 25375 - DNA, 36 bp, synthetic construct; identical to SEQ ID NO: 25373
  misc_feature 1..36: note = Synthetic oligonucleotide
  source 1..36: mol_type = other DNA

SEQ ID NO: 25376 - DNA, 36 bp, synthetic construct; identical to SEQ ID NO: 25373
  misc_feature 1..36: note = Synthetic oligonucleotide
  source 1..36: mol_type = other DNA

SEQ ID NO: 25377 - DNA, 36 bp, synthetic construct; identical to SEQ ID NO: 25373
  misc_feature 1..36: note = Synthetic oligonucleotide
  source 1..36: mol_type = other DNA

SEQ ID NO: 25378 - DNA, 36 bp, synthetic construct; identical to SEQ ID NO: 25373
  misc_feature 1..36: note = Synthetic oligonucleotide
  source 1..36: mol_type = other DNA

SEQ ID NO: 25379 - DNA, 36 bp, synthetic construct; identical to SEQ ID NO: 25373
  misc_feature 1..36: note = Synthetic oligonucleotide
  source 1..36: mol_type = other DNA

SEQ ID NO: 25380 - DNA, 36 bp, synthetic construct; identical to SEQ ID NO: 25373
  misc_feature 1..36: note = Synthetic oligonucleotide
  source 1..36: mol_type = other DNA

SEQ ID NO: 25381 - DNA, 36 bp, synthetic construct; identical to SEQ ID NO: 25373
  misc_feature 1..36: note = Synthetic oligonucleotide
  source 1..36: mol_type = other DNA

SEQ ID NO: 25382 - DNA, 36 bp, synthetic construct; identical to SEQ ID NO: 25373
  misc_feature 1..36: note = Synthetic oligonucleotide
  source 1..36: mol_type = other DNA

SEQ ID NO: 25383 - DNA, 36 bp, synthetic construct; identical to SEQ ID NO: 25373
  misc_feature 1..36: note = Synthetic oligonucleotide
  source 1..36: mol_type = other DNA

SEQ ID NO: 25384 - DNA, 36 bp, synthetic construct; identical to SEQ ID NO: 25373
  misc_feature 1..36: note = Synthetic oligonucleotide
  source 1..36: mol_type = other DNA

SEQ ID NO: 25385 - DNA, 36 bp, synthetic construct; identical to SEQ ID NO: 25373
  misc_feature 1..36: note = Synthetic oligonucleotide
  source 1..36: mol_type = other DNA

SEQ ID NO: 25386 - DNA, 36 bp, synthetic construct; identical to SEQ ID NO: 25373
  misc_feature 1..36: note = Synthetic oligonucleotide
  source 1..36: mol_type = other DNA

SEQ ID NO: 25387 - DNA, 36 bp, synthetic construct; identical to SEQ ID NO: 25373
  misc_feature 1..36: note = Synthetic oligonucleotide
  source 1..36: mol_type = other DNA

SEQ ID NO: 25388 - DNA, 36 bp, synthetic construct; identical to SEQ ID NO: 25373
  misc_feature 1..36: note = Synthetic oligonucleotide
  source 1..36: mol_type = other DNA

SEQ ID NO: 25389 - DNA, 36 bp, synthetic construct; identical to SEQ ID NO: 25373
  misc_feature 1..36: note = Synthetic oligonucleotide
  source 1..36: mol_type = other DNA

SEQ ID NO: 25390 - DNA, 36 bp, synthetic construct; identical to SEQ ID NO: 25373
  misc_feature 1..36: note = Synthetic oligonucleotide
  source 1..36: mol_type = other DNA

SEQ ID NO: 25391 - DNA, 36 bp, synthetic construct; identical to SEQ ID NO: 25373
  misc_feature 1..36: note = Synthetic oligonucleotide
  source 1..36: mol_type = other DNA

SEQ ID NO: 25392 - DNA, 36 bp, synthetic construct; identical to SEQ ID NO: 25373
  misc_feature 1..36: note = Synthetic oligonucleotide
  source 1..36: mol_type = other DNA

SEQ ID NO: 25393 - DNA, 36 bp, synthetic construct; identical to SEQ ID NO: 25373
  misc_feature 1..36: note = Synthetic oligonucleotide
  source 1..36: mol_type = other DNA

SEQ ID NO: 25394 - DNA, 36 bp, synthetic construct; identical to SEQ ID NO: 25373
  misc_feature 1..36: note = Synthetic oligonucleotide
  source 1..36: mol_type = other DNA

SEQ ID NO: 25395 - DNA, 36 bp, synthetic construct; identical to SEQ ID NO: 25373
  misc_feature 1..36: note = Synthetic oligonucleotide
  source 1..36: mol_type = other DNA

SEQ ID NO: 25396 - DNA, 36 bp, synthetic construct; identical to SEQ ID NO: 11263
  misc_feature 1..36: note = Synthetic oligonucleotide
  source 1..36: mol_type = other DNA

SEQ ID NO: 25397 - DNA, 36 bp, synthetic construct
  misc_feature 1..36: note = Synthetic oligonucleotide
  source 1..36: mol_type = other DNA
attataccataccgagagctattagggaactatgac

SEQ ID NO: 25398 - DNA, 36 bp, synthetic construct
  misc_feature 1..36: note = Synthetic oligonucleotide
  source 1..36: mol_type = other DNA
attataccatgacctgatctgtaagggagctataac

SEQ ID NO: 25399 - DNA, 36 bp, synthetic construct; identical to SEQ ID NO: 11270
  misc_feature 1..36: note = Synthetic oligonucleotide
  source 1..36: mol_type = other DNA

SEQ ID NO: 25400 - DNA, 36 bp, synthetic construct; identical to SEQ ID NO: 11272
  misc_feature 1..36: note = Synthetic oligonucleotide
  source 1..36: mol_type = other DNA

SEQ ID NO: 25401 - DNA, 36 bp, synthetic construct; identical to SEQ ID NO: 11272
  misc_feature 1..36: note = Synthetic oligonucleotide
  source 1..36: mol_type = other DNA

SEQ ID NO: 25402 - DNA, 36 bp, synthetic construct; identical to SEQ ID NO: 11272
  misc_feature 1..36: note = Synthetic oligonucleotide
  source 1..36: mol_type = other DNA

SEQ ID NO: 25403 - DNA, 30 bp, synthetic construct
  misc_feature 1..30: note = Synthetic oligonucleotide
  source 1..30: mol_type = other DNA
attataccgcgcctctccggggggggaagc

SEQ ID NO: 25404 - DNA, 36 bp, synthetic construct
  misc_feature 1..36: note = Synthetic oligonucleotide
  source 1..36: mol_type = other DNA
attataccgtattcaactatggaagggtagtacggt

SEQ ID NO: 25405 - DNA, 36 bp, synthetic construct; identical to SEQ ID NO: 11275
  misc_feature 1..36: note = Synthetic oligonucleotide
  source 1..36: mol_type = other DNA

SEQ ID NO: 25406 - DNA, 36 bp, synthetic construct; identical to SEQ ID NO: 11278
  misc_feature 1..36: note = Synthetic oligonucleotide
  source 1..36: mol_type = other DNA

SEQ ID NO: 25407 - DNA, 36 bp, synthetic construct; identical to SEQ ID NO: 11280
  misc_feature 1..36: note = Synthetic oligonucleotide
  source 1..36: mol_type = other DNA

SEQ ID NO: 25408 - DNA, 36 bp, synthetic construct; identical to SEQ ID NO: 11280
  misc_feature 1..36: note = Synthetic oligonucleotide
  source 1..36: mol_type = other DNA

SEQ ID NO: 25409 - DNA, 36 bp, synthetic construct; identical to SEQ ID NO: 11280
  misc_feature 1..36: note = Synthetic oligonucleotide
  source 1..36: mol_type = other DNA

SEQ ID NO: 25410 - DNA, 36 bp, synthetic construct; identical to SEQ ID NO: 11280
  misc_feature 1..36: note = Synthetic oligonucleotide
  source 1..36: mol_type = other DNA

SEQ ID NO: 25411 - DNA, 36 bp, synthetic construct; identical to SEQ ID NO: 11280
  misc_feature 1..36: note = Synthetic oligonucleotide
  source 1..36: mol_type = other DNA

SEQ ID NO: 25412 - DNA, 36 bp, synthetic construct; identical to SEQ ID NO: 11280
  misc_feature 1..36: note = Synthetic oligonucleotide
  source 1..36: mol_type = other DNA

SEQ ID NO: 25413 - DNA, 36 bp, synthetic construct; identical to SEQ ID NO: 11280
  misc_feature 1..36: note = Synthetic oligonucleotide
  source 1..36: mol_type = other DNA

SEQ ID NO: 25414 - DNA, 36 bp, synthetic construct; identical to SEQ ID NO: 11280
  misc_feature 1..36: note = Synthetic oligonucleotide
  source 1..36: mol_type = other DNA

SEQ ID NO: 25415 - DNA, 36 bp, synthetic construct
  misc_feature 1..36: note = Synthetic oligonucleotide
  source 1..36: mol_type = other DNA
attatacctttgagagagataatagggaactacaac

SEQ ID NO: 25416 - DNA, 36 bp, synthetic construct; identical to SEQ ID NO: 11282
  misc_feature 1..36: note = Synthetic oligonucleotide
  source 1..36: mol_type = other DNA

SEQ ID NO: 25417 - DNA, 36 bp, synthetic construct; identical to SEQ ID NO: 11282
  misc_feature 1..36: note = Synthetic oligonucleotide
  source 1..36: mol_type = other DNA

SEQ ID NO: 25418 - DNA, 36 bp, synthetic construct
  misc_feature 1..36: note = Synthetic oligonucleotide
  source 1..36: mol_type = other DNA
attatagcaaaaccgagtgagatggggcgctataac

SEQ ID NO: 25419 - DNA, 36 bp, synthetic construct
  misc_feature 1..36: note = Synthetic oligonucleotide
  source 1..36: mol_type = other DNA
attatagcaaataggaaaaggtggtcaagctgcaac

SEQ ID NO: 25420 - DNA, 36 bp, synthetic construct
  misc_feature 1..36: note = Synthetic oligonucleotide
  source 1..36: mol_type = other DNA
attatagcaaataggaaagagtggtcaagccgcaac

SEQ ID NO: 25421 - DNA, 36 bp, synthetic construct; identical to SEQ ID NO: 11285
  misc_feature 1..36: note = Synthetic oligonucleotide
  source 1..36: mol_type = other DNA

SEQ ID NO: 25422 - DNA, 36 bp, synthetic construct; identical to SEQ ID NO: 11285
  misc_feature 1..36: note = Synthetic oligonucleotide
  source 1..36: mol_type = other DNA

SEQ ID NO: 25423 - DNA, 36 bp, synthetic construct; identical to SEQ ID NO: 11285
  misc_feature 1..36: note = Synthetic oligonucleotide
  source 1..36: mol_type = other DNA

SEQ ID NO: 25424 - DNA, 36 bp, synthetic construct; identical to SEQ ID NO: 11285
  misc_feature 1..36: note = Synthetic oligonucleotide
  source 1..36: mol_type = other DNA

SEQ ID NO: 25425 - DNA, 36 bp, synthetic construct; identical to SEQ ID NO: 11285
  misc_feature 1..36: note = Synthetic oligonucleotide
  source 1..36: mol_type = other DNA

SEQ ID NO: 25426 - DNA, 36 bp, synthetic construct; identical to SEQ ID NO: 11285
  misc_feature 1..36: note = Synthetic oligonucleotide
  source 1..36: mol_type = other DNA

SEQ ID NO: 25427 - DNA, 36 bp, synthetic construct; identical to SEQ ID NO: 11285
  misc_feature 1..36: note = Synthetic oligonucleotide
  source 1..36: mol_type = other DNA

SEQ ID NO: 25428 - DNA, 36 bp, synthetic construct; identical to SEQ ID NO: 11285
  misc_feature 1..36: note = Synthetic oligonucleotide
  source 1..36: mol_type = other DNA

SEQ ID NO: 25429 - DNA, 36 bp, synthetic construct; identical to SEQ ID NO: 11285
  misc_feature 1..36: note = Synthetic oligonucleotide
  source 1..36: mol_type = other DNA

SEQ ID NO: 25430 - DNA, 36 bp, synthetic construct; identical to SEQ ID NO: 11285
  misc_feature 1..36: note = Synthetic oligonucleotide
  source 1..36: mol_type = other DNA

SEQ ID NO: 25431 - DNA, 36 bp, synthetic construct; identical to SEQ ID NO: 11285
  misc_feature 1..36: note = Synthetic oligonucleotide
  source 1..36: mol_type = other DNA

SEQ ID NO: 25432 - DNA, 36 bp, synthetic construct; identical to SEQ ID NO: 11285
  misc_feature 1..36: note = Synthetic oligonucleotide
  source 1..36: mol_type = other DNA

SEQ ID NO: 25433 - DNA, 36 bp, synthetic construct; identical to SEQ ID NO: 11285
  misc_feature 1..36: note = Synthetic oligonucleotide
  source 1..36: mol_type = other DNA

SEQ ID NO: 25434 - DNA, 37 bp, synthetic construct
  misc_feature 1..37: note = Synthetic oligonucleotide
  source 1..37: mol_type = other DNA
attatagcagaaccgagtgagatggggggctataact

SEQ ID NO: 25435 - DNA, 35 bp, synthetic construct
  misc_feature 1..35: note = Synthetic oligonucleotide
  source 1..35: mol_type = other DNA
attatagcagagcgagcacttccctcaaaacatag

SEQ ID NO: 25436 - DNA, 36 bp, synthetic construct
  misc_feature 1..36: note = Synthetic oligonucleotide
  source 1..36: mol_type = other DNA
attatagcagataattattttgggtcaaaccgcaac

SEQ ID NO: 25437 - DNA, 36 bp, synthetic construct; identical to SEQ ID NO: 11288
  misc_feature 1..36: note = Synthetic oligonucleotide
  source 1..36: mol_type = other DNA

SEQ ID NO: 25438 - DNA, 36 bp, synthetic construct
  misc_feature 1..36: note = Synthetic oligonucleotide
  source 1..36: mol_type = other DNA
attatagcagatcagaaaacgcggtccagctgcaac

SEQ ID NO: 25439 - DNA, 36 bp, synthetic construct
  misc_feature 1..36: note = Synthetic oligonucleotide
  source 1..36: mol_type = other DNA
attatagcataaagagaggaaaaaggggactacaac

SEQ ID NO: 25440 - DNA, 36 bp, synthetic construct; identical to SEQ ID NO: 11290
  misc_feature 1..36: note = Synthetic oligonucleotide
  source 1..36: mol_type = other DNA

SEQ ID NO: 25441 - DNA, 37 bp, synthetic construct
  misc_feature 1..37: note = Synthetic oligonucleotide
  source 1..37: mol_type = other DNA
attatagcataccggagaacaaaggggaactataaca

SEQ ID NO: 25442 - DNA, 36 bp, synthetic construct
  misc_feature 1..36: note = Synthetic oligonucleotide
  source 1..36: mol_type = other DNA
attatagcataccggagaattgagggaaactataac

SEQ ID NO: 25443 - DNA, 33 bp, synthetic construct
  misc_feature 1..33: note = Synthetic oligonucleotide
  source 1..33: mol_type = other DNA
attatagcatataaaaaattccttacaagcccc

SEQ ID NO: 25444 - DNA, 36 bp, synthetic construct
  misc_feature 1..36: note = Synthetic oligonucleotide
  source 1..36: mol_type = other DNA
attatagcatatatgagtgggaacaggtgctataac

SEQ ID NO: 25445 - DNA, 36 bp, synthetic construct
  misc_feature 1..36: note = Synthetic oligonucleotide
  source 1..36: mol_type = other DNA
attatagcatatcgagattttactaggaactataac

SEQ ID NO: 25446 - DNA, 36 bp, synthetic construct; identical to SEQ ID NO: 11299
  misc_feature 1..36: note = Synthetic oligonucleotide
  source 1..36: mol_type = other DNA

SEQ ID NO: 25447 - DNA, 36 bp, synthetic construct; identical to SEQ ID NO: 11299
  misc_feature 1..36: note = Synthetic oligonucleotide
  source 1..36: mol_type = other DNA

SEQ ID NO: 25448 - DNA, 36 bp, synthetic construct; identical to SEQ ID NO: 11300
  misc_feature 1..36: note = Synthetic oligonucleotide
  source 1..36: mol_type = other DNA

SEQ ID NO: 25449 - DNA, 36 bp, synthetic construct; identical to SEQ ID NO: 11300
  misc_feature 1..36: note = Synthetic oligonucleotide
  source 1..36: mol_type = other DNA

SEQ ID NO: 25450 - DNA, 36 bp, synthetic construct; identical to SEQ ID NO: 11300
  misc_feature 1..36: note = Synthetic oligonucleotide
  source 1..36: mol_type = other DNA

SEQ ID NO: 25451 - DNA, 36 bp, synthetic construct; identical to SEQ ID NO: 11300
  misc_feature 1..36: note = Synthetic oligonucleotide
  source 1..36: mol_type = other DNA

SEQ ID NO: 25452 - DNA, 36 bp, synthetic construct; identical to SEQ ID NO: 11300
  misc_feature 1..36: note = Synthetic oligonucleotide
  source 1..36: mol_type = other DNA

SEQ ID NO: 25453 - DNA, 36 bp, synthetic construct; identical to SEQ ID NO: 11300
  misc_feature 1..36: note = Synthetic oligonucleotide
  source 1..36: mol_type = other DNA

SEQ ID NO: 25454 - DNA, 36 bp, synthetic construct; identical to SEQ ID NO: 11300
  misc_feature 1..36: note = Synthetic oligonucleotide
  source 1..36: mol_type = other DNA

SEQ ID NO: 25455 - DNA, 36 bp, synthetic construct; identical to SEQ ID NO: 11300
  misc_feature 1..36: note = Synthetic oligonucleotide
  source 1..36: mol_type = other DNA

SEQ ID NO: 25456 - DNA, 36 bp, synthetic construct; identical to SEQ ID NO: 11300
  misc_feature 1..36: note = Synthetic oligonucleotide
  source 1..36: mol_type = other DNA

SEQ ID NO: 25457 - DNA, 36 bp, synthetic construct; identical to SEQ ID NO: 11300
  misc_feature 1..36: note = Synthetic oligonucleotide
  source 1..36: mol_type = other DNA

SEQ ID NO: 25458 - DNA, 36 bp, synthetic construct; identical to SEQ ID NO: 11300
  misc_feature 1..36: note = Synthetic oligonucleotide
  source 1..36: mol_type = other DNA

SEQ ID NO: 25459 - DNA, 36 bp, synthetic construct; identical to SEQ ID NO: 11303
  misc_feature 1..36: note = Synthetic oligonucleotide
  source 1..36: mol_type = other DNA

SEQ ID NO: 25460 - DNA, 36 bp, synthetic construct
  misc_feature 1..36: note = Synthetic oligonucleotide
  source 1..36: mol_type = other DNA
attatagcatcccggggtgagagagggaactacaac

SEQ ID NO: 25461 - DNA, 36 bp, synthetic construct; identical to SEQ ID NO: 11304
  misc_feature 1..36: note = Synthetic oligonucleotide
  source 1..36: mol_type = other DNA

SEQ ID NO: 25462 - DNA, 36 bp, synthetic construct
  misc_feature 1..36: note = Synthetic oligonucleotide
  source 1..36: mol_type = other DNA
attatagcatgtcggagtgcggtagggagctgtaac

SEQ ID NO: 25463 - DNA, 36 bp, synthetic construct
  misc_feature 1..36: note = Synthetic oligonucleotide
  source 1..36: mol_type = other DNA
attatagcatttcggagtgcggcagggagctacaac

SEQ ID NO: 25464 - DNA, 36 bp, synthetic construct; identical to SEQ ID NO: 25463
  misc_feature 1..36: note = Synthetic oligonucleotide
  source 1..36: mol_type = other DNA

SEQ ID NO: 25465 - DNA, 36 bp, synthetic construct
  misc_feature 1..36: note = Synthetic oligonucleotide
  source 1..36: mol_type = other DNA
attatagcatttcggagtgtggcagagagctataac

SEQ ID NO: 25466 - DNA, 36 bp, synthetic construct
  misc_feature 1..36: note = Synthetic oligonucleotide
  source 1..36: mol_type = other DNA
attatagccgatggaaaatcggggtccagccgcaac

SEQ ID NO: 25467 - DNA, 36 bp, synthetic construct
  misc_feature 1..36: note = Synthetic oligonucleotide
  source 1..36: mol_type = other DNA
attatagccgatgggagatcggggagcaaccgcaac

SEQ ID NO: 25468 - DNA, 36 bp, synthetic construct; identical to SEQ ID NO: 25467
  misc_feature 1..36: note = Synthetic oligonucleotide
  source 1..36: mol_type = other DNA

SEQ ID NO: 25469 - DNA, 36 bp, synthetic construct; identical to SEQ ID NO: 11307
  misc_feature 1..36: note = Synthetic oligonucleotide
  source 1..36: mol_type = other DNA

SEQ ID NO: 25470 - DNA, 36 bp, synthetic construct
  misc_feature 1..36: note = Synthetic oligonucleotide
  source 1..36: mol_type = other DNA
attatagcgtatccgagtgagaaagggggctataac

SEQ ID NO: 25471 - DNA, 36 bp, synthetic construct
  misc_feature 1..36: note = Synthetic oligonucleotide
  source 1..36: mol_type = other DNA
attatagctaattatagtttgtaggggaactataac

SEQ ID NO: 25472 - DNA, 36 bp, synthetic construct
  misc_feature 1..36: note = Synthetic oligonucleotide
  source 1..36: mol_type = other DNA
attatagctgattaggaattggcgtcaaactgcaac

SEQ ID NO: 25473 - DNA, 36 bp, synthetic construct; identical to SEQ ID NO: 25472
  misc_feature 1..36: note = Synthetic oligonucleotide
  source 1..36: mol_type = other DNA

SEQ ID NO: 25474 - DNA, 36 bp, synthetic construct
  misc_feature 1..36: note = Synthetic oligonucleotide
  source 1..36: mol_type = other DNA
attatagcttgccttctaatgcggtaggctcaaaac

SEQ ID NO: 25475 - DNA, 36 bp, synthetic construct
  misc_feature 1..36: note = Synthetic oligonucleotide
  source 1..36: mol_type = other DNA
attatagtcgcttaaattcaaatgtccagttgtaac

SEQ ID NO: 25476 - DNA, 36 bp, synthetic construct
  misc_feature 1..36: note = Synthetic oligonucleotide
  source 1..36: mol_type = other DNA
attatatcaaactgcttctagaggtggtgtcaaaac

SEQ ID NO: 25477 - DNA, 36 bp, synthetic construct; identical to SEQ ID NO: 11324
  misc_feature 1..36: note = Synthetic oligonucleotide
  source 1..36: mol_type = other DNA

SEQ ID NO: 25478 - DNA, 36 bp, synthetic construct; identical to SEQ ID NO: 11325
  misc_feature 1..36: note = Synthetic oligonucleotide
  source 1..36: mol_type = other DNA

SEQ ID NO: 25479 - DNA, 36 bp, synthetic construct
  misc_feature 1..36: note = Synthetic oligonucleotide
  source 1..36: mol_type = other DNA
attatatcaaattggttttgaatgtcaagttgcaac

SEQ ID NO: 25480 - DNA, 36 bp, synthetic construct
  misc_feature 1..36: note = Synthetic oligonucleotide
  source 1..36: mol_type = other DNA
attatatcaatatctaaactattagggaactataac

SEQ ID NO: 25481 - DNA, 36 bp, synthetic construct; identical to SEQ ID NO: 11327
  misc_feature 1..36: note = Synthetic oligonucleotide
  source 1..36: mol_type = other DNA

SEQ ID NO: 25482 - DNA, 36 bp, synthetic construct; identical to SEQ ID NO: 11327
  misc_feature 1..36: note = Synthetic oligonucleotide
  source 1..36: mol_type = other DNA

SEQ ID NO: 25483 - DNA, 36 bp, synthetic construct; identical to SEQ ID NO: 11327
  misc_feature 1..36: note = Synthetic oligonucleotide
  source 1..36: mol_type = other DNA

SEQ ID NO: 25484 - DNA, 36 bp, synthetic construct; identical to SEQ ID NO: 11327
  misc_feature 1..36: note = Synthetic oligonucleotide
  source 1..36: mol_type = other DNA

SEQ ID NO: 25485 - DNA, 36 bp, synthetic construct; identical to SEQ ID NO: 11327
  misc_feature 1..36: note = Synthetic oligonucleotide
  source 1..36: mol_type = other DNA

SEQ ID NO: 25486 - DNA, 36 bp, synthetic construct; identical to SEQ ID NO: 11327
  misc_feature 1..36: note = Synthetic oligonucleotide
  source 1..36: mol_type = other DNA

SEQ ID NO: 25487 - DNA, 36 bp, synthetic construct; identical to SEQ ID NO: 11327
  misc_feature 1..36: note = Synthetic oligonucleotide
  source 1..36: mol_type = other DNA

SEQ ID NO: 25488 - DNA, 36 bp, synthetic construct; identical to SEQ ID NO: 11327
  misc_feature 1..36: note = Synthetic oligonucleotide
  source 1..36: mol_type = other DNA

SEQ ID NO: 25489 - DNA, 36 bp, synthetic construct; identical to SEQ ID NO: 11327
  misc_feature 1..36: note = Synthetic oligonucleotide
  source 1..36: mol_type = other DNA

SEQ ID NO: 25490 - DNA, 36 bp, synthetic construct; identical to SEQ ID NO: 11327
  misc_feature 1..36: note = Synthetic oligonucleotide
  source 1..36: mol_type = other DNA

SEQ ID NO: 25491 - DNA, 36 bp, synthetic construct; identical to SEQ ID NO: 11327
  misc_feature 1..36: note = Synthetic oligonucleotide
  source 1..36: mol_type = other DNA

SEQ ID NO: 25492 - DNA, 36 bp, synthetic construct; identical to SEQ ID NO: 11327
  misc_feature 1..36: note = Synthetic oligonucleotide
  source 1..36: mol_type = other DNA

SEQ ID NO: 25493 - DNA, 36 bp, synthetic construct; identical to SEQ ID NO: 11327
  misc_feature 1..36: note = Synthetic oligonucleotide
  source 1..36: mol_type = other DNA

SEQ ID NO: 25494 - DNA, 36 bp, synthetic construct
  misc_feature 1..36: note = Synthetic oligonucleotide
  source 1..36: mol_type = other DNA
attatatcacaagtcttttaaagggggagtcaaaac

SEQ ID NO: 25495 - DNA, 36 bp, synthetic construct
  misc_feature 1..36: note = Synthetic oligonucleotide
  source 1..36: mol_type = other DNA
attatatcactatcgaatttattagaggactataac

SEQ ID NO: 25496 - DNA, 37 bp, synthetic construct; identical to SEQ ID NO: 11333
  misc_feature 1..37: note = Synthetic oligonucleotide
  source 1..37: mol_type = other DNA

SEQ ID NO: 25497 - DNA, 37 bp, synthetic construct; identical to SEQ ID NO: 11333
  misc_feature 1..37: note = Synthetic oligonucleotide
  source 1..37: mol_type = other DNA

SEQ ID NO: 25498 - DNA, 36 bp, synthetic construct
  misc_feature 1..36: note = Synthetic oligonucleotide
  source 1..36: mol_type = other DNA
attatatcagacgcgcctccggggggaaggcaaaac

SEQ ID NO: 25499 - DNA, 36 bp, synthetic construct; identical to SEQ ID NO: 25498
  misc_feature 1..36: note = Synthetic oligonucleotide
  source 1..36: mol_type = other DNA

SEQ ID NO: 25500 - DNA, 36 bp, synthetic construct; identical to SEQ ID NO: 11337
  misc_feature 1..36: note = Synthetic oligonucleotide
  source 1..36: mol_type = other DNA

SEQ ID NO: 25501 - DNA, 36 bp, synthetic construct
  misc_feature 1..36: note = Synthetic oligonucleotide
  source 1..36: mol_type = other DNA
attatatcataccaagaataattagggaactataac

SEQ ID NO: 25502 - DNA, 36 bp, synthetic construct; identical to SEQ ID NO: 11338
  misc_feature 1..36: note = Synthetic oligonucleotide
  source 1..36: mol_type = other DNA

SEQ ID NO: 25503 - DNA, 36 bp, synthetic construct; identical to SEQ ID NO: 11338
  misc_feature 1..36: note = Synthetic oligonucleotide
  source 1..36: mol_type = other DNA

SEQ ID NO: 25504 - DNA, 36 bp, synthetic construct
  misc_feature 1..36: note = Synthetic oligonucleotide
  source 1..36: mol_type = other DNA
attatatcataccaagcgataactgggaacaacaac

SEQ ID NO: 25505 - DNA, 36 bp, synthetic construct; identical to SEQ ID NO: 25504
  misc_feature 1..36: note = Synthetic oligonucleotide
  source 1..36: mol_type = other DNA

SEQ ID NO: 25506 - DNA, 37 bp, synthetic construct
  misc_feature 1..37: note = Synthetic oligonucleotide
  source 1..37: mol_type = other DNA
attatatcataccaagcgataactgggaacaacaacc

SEQ ID NO: 25507 - DNA, 36 bp, synthetic construct
  misc_feature 1..36: note = Synthetic oligonucleotide
  source 1..36: mol_type = other DNA
attatatcataccaagtgataacagggaattacaac

SEQ ID NO: 25508 - DNA, 36 bp, synthetic construct
  misc_feature 1..36: note = Synthetic oligonucleotide
  source 1..36: mol_type = other DNA
attatatcatatcaaaacttagaagagaactataac

SEQ ID NO: 25509 - DNA, 36 bp, synthetic construct; identical to SEQ ID NO: 11340
  misc_feature 1..36: note = Synthetic oligonucleotide
  source 1..36: mol_type = other DNA

SEQ ID NO: 25510 - DNA, 36 bp, synthetic construct; identical to SEQ ID NO: 11341
  misc_feature 1..36: note = Synthetic oligonucleotide
  source 1..36: mol_type = other DNA

SEQ ID NO: 25511 - DNA, 36 bp, synthetic construct
  misc_feature 1..36: note = Synthetic oligonucleotide
  source 1..36: mol_type = other DNA
attatatcatatcaaaatataatatggaactataac

SEQ ID NO: 25512 - DNA, 36 bp, synthetic construct; identical to SEQ ID NO: 25511
  misc_feature 1..36: note = Synthetic oligonucleotide
  source 1..36: mol_type = other DNA

SEQ ID NO: 25513 - DNA, 36 bp, synthetic construct
  misc_feature 1..36: note = Synthetic oligonucleotide
  source 1..36: mol_type = other DNA
attatatcatatcagagaataatcgggaactataac

SEQ ID NO: 25514 - DNA, 36 bp, synthetic construct
  misc_feature 1..36: note = Synthetic oligonucleotide
  source 1..36: mol_type = other DNA
attatatcatattctaaattattagggaactataac

SEQ ID NO: 25515 - DNA, 36 bp, synthetic construct; identical to SEQ ID NO: 11343
  misc_feature 1..36: note = Synthetic oligonucleotide
  source 1..36: mol_type = other DNA

SEQ ID NO: 25516 - DNA, 36 bp, synthetic construct; identical to SEQ ID NO: 11343
  misc_feature 1..36: note = Synthetic oligonucleotide
  source 1..36: mol_type = other DNA

SEQ ID NO: 25517 - DNA, 36 bp, synthetic construct
  misc_feature 1..36: note = Synthetic oligonucleotide
  source 1..36: mol_type = other DNA
attatatcatattctaaattgttagggaactataac

SEQ ID NO: 25518 - DNA, 36 bp, synthetic construct; identical to SEQ ID NO: 25517
  misc_feature 1..36: note = Synthetic oligonucleotide
  source 1..36: mol_type = other DNA

SEQ ID NO: 25519 - DNA, 36 bp, synthetic construct
  misc_feature 1..36: note = Synthetic oligonucleotide
  source 1..36: mol_type = other DNA
attatatcatatttcatttcaaagaacgattctaac

SEQ ID NO: 25520 - DNA, 29 bp, synthetic construct
  misc_feature 1..29: note = Synthetic oligonucleotide
  source 1..29: mol_type = other DNA
attatgttattttgtatggtaacaaaact

SEQ ID NO: 25521 - DNA, 36 bp, synthetic construct
  misc_feature 1..36: note = Synthetic oligonucleotide
  source 1..36: mol_type = other DNA
attatttattattccatttttctttcaaaccacaac

SEQ ID NO: 25522 - DNA, 36 bp, synthetic construct
  misc_feature 1..36: note = Synthetic oligonucleotide
  source 1..36: mol_type = other DNA
attattttacaccaaaattagaaatcaaaccacaac

SEQ ID NO: 25523 - DNA, 36 bp, synthetic construct; identical to SEQ ID NO: 25522
  misc_feature 1..36: note = Synthetic oligonucleotide
  source 1..36: mol_type = other DNA

SEQ ID NO: 25524 - DNA, 38 bp, synthetic construct
  misc_feature 1..38: note = Synthetic oligonucleotide
  source 1..38: mol_type = other DNA
attattttacatcaaaattagaaatcaaaccacaactt

SEQ ID NO: 25525 - DNA, 30 bp, synthetic construct
  misc_feature 1..30: note = Synthetic oligonucleotide
  source 1..30: mol_type = other DNA
attcaaatacaacatttgttaaagttaaat

SEQ ID NO: 25526 - DNA, 36 bp, synthetic construct; identical to SEQ ID NO: 11354
  misc_feature 1..36: note = Synthetic oligonucleotide
  source 1..36: mol_type = other DNA

SEQ ID NO: 25527 - DNA, 35 bp, synthetic construct
  misc_feature 1..35: note = Synthetic oligonucleotide
  source 1..35: mol_type = other DNA
attcagctgtaactcataaccgggttaagcccaaa

SEQ ID NO: 25528 - DNA, 36 bp, synthetic construct
  misc_feature 1..36: note = Synthetic oligonucleotide
  source 1..36: mol_type = other DNA
attccatgatgactcaattcttccaggtactaaaac

SEQ ID NO: 25529 - DNA, 36 bp, synthetic construct
  misc_feature 1..36: note = Synthetic oligonucleotide
  source 1..36: mol_type = other DNA
attccatgatgactcaattcttctaggtactaaaac

SEQ ID NO: 25530 - DNA, 36 bp, synthetic construct; identical to SEQ ID NO: 11359
  misc_feature 1..36: note = Synthetic oligonucleotide
  source 1..36: mol_type = other DNA

SEQ ID NO: 25531 - DNA, 36 bp, synthetic construct; identical to SEQ ID NO: 11359
  misc_feature 1..36: note = Synthetic oligonucleotide
  source 1..36: mol_type = other DNA

SEQ ID NO: 25532 - DNA, 36 bp, synthetic construct; identical to SEQ ID NO: 11359
  misc_feature 1..36: note = Synthetic oligonucleotide
  source 1..36: mol_type = other DNA

SEQ ID NO: 25533 - DNA, 36 bp, synthetic construct
  misc_feature 1..36: note = Synthetic oligonucleotide
  source 1..36: mol_type = other DNA
attctaacgacccggcctccggggggaaggcaaaac

SEQ ID NO: 25534 - DNA, 36 bp, synthetic construct
  misc_feature 1..36: note = Synthetic oligonucleotide
  source 1..36: mol_type = other DNA
attctaactcatctctctgagaggagaagccaaaac

SEQ ID NO: 25535 - DNA, 36 bp, synthetic construct
  misc_feature 1..36: note = Synthetic oligonucleotide
  source 1..36: mol_type = other DNA
attctaactcatctgaagaagtagtcaacccgcaac

SEQ ID NO: 25536 - DNA, 36 bp, synthetic construct
  misc_feature 1..36: note = Synthetic oligonucleotide
  source 1..36: mol_type = other DNA
attctaactgattaggatatgcgtaccagctggaac

SEQ ID NO: 25537 - DNA, 36 bp, synthetic construct
  misc_feature 1..36: note = Synthetic oligonucleotide
  source 1..36: mol_type = other DNA
attctacactatcgggatatgcgctctgaccggaac

SEQ ID NO: 25538 - DNA, 36 bp, synthetic construct; identical to SEQ ID NO: 11364
  misc_feature 1..36: note = Synthetic oligonucleotide
  source 1..36: mol_type = other DNA

SEQ ID NO: 25539 - DNA, 36 bp, synthetic construct
  misc_feature 1..36: note = Synthetic oligonucleotide
  source 1..36: mol_type = other DNA
attctaccgcacgcgcctccggggggaaggcaaaac

SEQ ID NO: 25540 - DNA, 36 bp, synthetic construct; identical to SEQ ID NO: 11365
  misc_feature 1..36: note = Synthetic oligonucleotide
  source 1..36: mol_type = other DNA

SEQ ID NO: 25541 - DNA, 36 bp, synthetic construct; identical to SEQ ID NO: 11365
  misc_feature 1..36: note = Synthetic oligonucleotide
  source 1..36: mol_type = other DNA

SEQ ID NO: 25542 - DNA, 36 bp, synthetic construct
  misc_feature 1..36: note = Synthetic oligonucleotide
  source 1..36: mol_type = other DNA
attctacctgactttgccggggggtgaagtcagaac

SEQ ID NO: 25543 - DNA, 36 bp, synthetic construct; identical to SEQ ID NO: 25542
  misc_feature 1..36: note = Synthetic oligonucleotide
  source 1..36: mol_type = other DNA

SEQ ID NO: 25544 - DNA, 36 bp, synthetic construct; identical to SEQ ID NO: 11367
  misc_feature 1..36: note = Synthetic oligonucleotide
  source 1..36: mol_type = other DNA

SEQ ID NO: 25545 - DNA, 36 bp, synthetic construct
  misc_feature 1..36: note = Synthetic oligonucleotide
  source 1..36: mol_type = other DNA
attctagatcactgggatatgcgcactgaccggaac

SEQ ID NO: 25546 - DNA, 36 bp, synthetic construct
  misc_feature 1..36: note = Synthetic oligonucleotide
  source 1..36: mol_type = other DNA
attctaggtcactgggaaatgcgcactggccggaac

SEQ ID NO: 25547 - DNA, 36 bp, synthetic construct
  misc_feature 1..36: note = Synthetic oligonucleotide
  source 1..36: mol_type = other DNA
attctatcagactgggaaatgtgtactgaccggaac

SEQ ID NO: 25548 - DNA, 36 bp, synthetic construct; identical to SEQ ID NO: 25547
  misc_feature 1..36: note = Synthetic oligonucleotide
  source 1..36: mol_type = other DNA

SEQ ID NO: 25549 - DNA, 36 bp, synthetic construct
  misc_feature 1..36: note = Synthetic oligonucleotide
  source 1..36: mol_type = other DNA
attctatcaggcattccgatggtggggtatcggaac

SEQ ID NO: 25550 - DNA, 36 bp, synthetic construct
  misc_feature 1..36: note = Synthetic oligonucleotide
  source 1..36: mol_type = other DNA
attctatcaggcgcgcctccggggggaaggcaaaac

SEQ ID NO: 25551 - DNA, 36 bp, synthetic construct
  misc_feature 1..36: note = Synthetic oligonucleotide
  source 1..36: mol_type = other DNA
attctatgaaacctatttttgtcagcaaaccacaac

SEQ ID NO: 25552 - DNA, 29 bp, synthetic construct
  misc_feature 1..29: note = Synthetic oligonucleotide
  source 1..29: mol_type = other DNA
attctgacctcaccgattttggattcaag

SEQ ID NO: 25553 - DNA, 36 bp, synthetic construct
  misc_feature 1..36: note = Synthetic oligonucleotide
  source 1..36: mol_type = other DNA
attctgacctcaccgattttggattcaaggcaaagc

SEQ ID NO: 25554 - DNA, 36 bp, synthetic construct
  misc_feature 1..36: note = Synthetic oligonucleotide
  source 1..36: mol_type = other DNA
attctgcaccccccgtcattggaatcaaggcaaagc

SEQ ID NO: 25555 - DNA, 36 bp, synthetic construct
  misc_feature 1..36: note = Synthetic oligonucleotide
  source 1..36: mol_type = other DNA
attctgccagccccgcgattggaatcaaggcaaagc

SEQ ID NO: 25556 - DNA, 36 bp, synthetic construct
  misc_feature 1..36: note = Synthetic oligonucleotide
  source 1..36: mol_type = other DNA
attctgccagcctctgaattggactcaaggcaaagc

SEQ ID NO: 25557 - DNA, 36 bp, synthetic construct; identical to SEQ ID NO: 25556
  misc_feature 1..36: note = Synthetic oligonucleotide
  source 1..36: mol_type = other DNA

SEQ ID NO: 25558 - DNA, 36 bp, synthetic construct; identical to SEQ ID NO: 11380
  misc_feature 1..36: note = Synthetic oligonucleotide
  source 1..36: mol_type = other DNA

SEQ ID NO: 25559 - DNA, 36 bp, synthetic construct
  misc_feature 1..36: note = Synthetic oligonucleotide
  source 1..36: mol_type = other DNA
attctgccccccccgtatttggaatcaaggcaaagc

SEQ ID NO: 25560 - DNA, 36 bp, synthetic construct; identical to SEQ ID NO: 11383
  misc_feature 1..36: note = Synthetic oligonucleotide
  source 1..36: mol_type = other DNA

SEQ ID NO: 25561 - DNA, 36 bp, synthetic construct
  misc_feature 1..36: note = Synthetic oligonucleotide
  source 1..36: mol_type = other DNA
attctgctccccccggatttggactcaaggcaaagc

SEQ ID NO: 25562 - DNA, 20 bp, synthetic construct
  misc_feature 1..20: note = Synthetic oligonucleotide
  source 1..20: mol_type = other DNA
attcttggaaagaacattat

SEQ ID NO: 25563 - DNA, 36 bp, synthetic construct; identical to SEQ ID NO: 11386
  misc_feature 1..36: note = Synthetic oligonucleotide
  source 1..36: mol_type = other DNA

SEQ ID NO: 25564 - DNA, 36 bp, synthetic construct
  misc_feature 1..36: note = Synthetic oligonucleotide
  source 1..36: mol_type = other DNA
attgacttatatctcatttctacatcaaaccacaac

SEQ ID NO: 25565 - DNA, 36 bp, synthetic construct
  misc_feature 1..36: note = Synthetic oligonucleotide
  source 1..36: mol_type = other DNA
attgagaaataagatccccgggaaggggacggaaac

SEQ ID NO: 25566 - DNA, 36 bp, synthetic construct; identical to SEQ ID NO: 25565
  misc_feature 1..36: note = Synthetic oligonucleotide
  source 1..36: mol_type = other DNA

SEQ ID NO: 25567 - DNA, 36 bp, synthetic construct; identical to SEQ ID NO: 11388
  misc_feature 1..36: note = Synthetic oligonucleotide
  source 1..36: mol_type = other DNA

SEQ ID NO: 25568 - DNA, 36 bp, synthetic construct
  misc_feature 1..36: note = Synthetic oligonucleotide
  source 1..36: mol_type = other DNA
attgcagttggtctttcttttccagagtgctagacc

SEQ ID NO: 25569 - DNA, 36 bp, synthetic construct
  misc_feature 1..36: note = Synthetic oligonucleotide
  source 1..36: mol_type = other DNA
attgcttcttatctcatttctacatcaaaccacaac

SEQ ID NO: 25570 - DNA, 36 bp, synthetic construct; identical to SEQ ID NO: 25569
  misc_feature 1..36: note = Synthetic oligonucleotide
  source 1..36: mol_type = other DNA

SEQ ID NO: 25571 - DNA, 36 bp, synthetic construct; identical to SEQ ID NO: 25569
  misc_feature 1..36: note = Synthetic oligonucleotide
  source 1..36: mol_type = other DNA

SEQ ID NO: 25572 - DNA, 36 bp, synthetic construct; identical to SEQ ID NO: 25569
  misc_feature 1..36: note = Synthetic oligonucleotide
  source 1..36: mol_type = other DNA

SEQ ID NO: 25573 - DNA, 36 bp, synthetic construct
  misc_feature 1..36: note = Synthetic oligonucleotide
  source 1..36: mol_type = other DNA
attgctttatatctcttttctacatcaaaccacaac

SEQ ID NO: 25574 - DNA, 36 bp, synthetic construct; identical to SEQ ID NO: 25573
  misc_feature 1..36: note = Synthetic oligonucleotide
  source 1..36: mol_type = other DNA

SEQ ID NO: 25575 - DNA, 36 bp, synthetic construct
  misc_feature 1..36: note = Synthetic oligonucleotide
  source 1..36: mol_type = other DNA
attggtcgccattgtcaaagaacatcaaatcacaac

SEQ ID NO: 25576 - DNA, 36 bp, synthetic construct
  misc_feature 1..36: note = Synthetic oligonucleotide
  source 1..36: mol_type = other DNA
attgtaaagaacatttttttgtaatcaattcacaac

SEQ ID NO: 25577 - DNA, 38 bp, synthetic construct
  misc_feature 1..38: note = Synthetic oligonucleotide
  source 1..38: mol_type = other DNA
attgtaaatcccgcccgcaagaaagactagagtgaaag

SEQ ID NO: 25578 - DNA, 36 bp, synthetic construct; identical to SEQ ID NO: 11394
  misc_feature 1..36: note = Synthetic oligonucleotide
  source 1..36: mol_type = other DNA

SEQ ID NO: 25579 - DNA, 36 bp, synthetic construct; identical to SEQ ID NO: 11394
  misc_feature 1..36: note = Synthetic oligonucleotide
  source 1..36: mol_type = other DNA

SEQ ID NO: 25580 - DNA, 36 bp, synthetic construct
  misc_feature 1..36: note = Synthetic oligonucleotide
  source 1..36: mol_type = other DNA
attgtaacactacgagataagagaggaagctacaac

SEQ ID NO: 25581 - DNA, 36 bp, synthetic construct
  misc_feature 1..36: note = Synthetic oligonucleotide
  source 1..36: mol_type = other DNA
attgtaacagataccaatttgctaacgaatcacaac

SEQ ID NO: 25582 - DNA, 38 bp, synthetic construct
  misc_feature 1..38: note = Synthetic oligonucleotide
  source 1..38: mol_type = other DNA
attgtaacagcccgcgaagcaaaagctagagtgaaagt

SEQ ID NO: 25583 - DNA, 36 bp, synthetic construct
  misc_feature 1..36: note = Synthetic oligonucleotide
  source 1..36: mol_type = other DNA
attgtaacagggctgggttttgaggggtcttaaaac

SEQ ID NO: 25584 - DNA, 37 bp, synthetic construct
  misc_feature 1..37: note = Synthetic oligonucleotide
  source 1..37: mol_type = other DNA
attgtaaccgaccccggcctgccagcaatccccaacg

SEQ ID NO: 25585 - DNA, 36 bp, synthetic construct
  misc_feature 1..36: note = Synthetic oligonucleotide
  source 1..36: mol_type = other DNA
attgtaaccgactatcgcctaaacgcaaatcacaac

SEQ ID NO: 25586 - DNA, 36 bp, synthetic construct; identical to SEQ ID NO: 25585
  misc_feature 1..36: note = Synthetic oligonucleotide
  source 1..36: mol_type = other DNA

SEQ ID NO: 25587 - DNA, 36 bp, synthetic construct
  misc_feature 1..36: note = Synthetic oligonucleotide
  source 1..36: mol_type = other DNA
attgtaaccgactatcgcctaaatgcaaatcacaac

SEQ ID NO: 25588 - DNA, 36 bp, synthetic construct; identical to SEQ ID NO: 25587
  misc_feature 1..36: note = Synthetic oligonucleotide
  source 1..36: mol_type = other DNA

SEQ ID NO: 25589 - DNA, 36 bp, synthetic construct; identical to SEQ ID NO: 11398
  misc_feature 1..36: note = Synthetic oligonucleotide
  source 1..36: mol_type = other DNA

SEQ ID NO: 25590 - DNA, 36 bp, synthetic construct; identical to SEQ ID NO: 11402
  misc_feature 1..36: note = Synthetic oligonucleotide
  source 1..36: mol_type = other DNA

SEQ ID NO: 25591 - DNA, 36 bp, synthetic construct; identical to SEQ ID NO: 11402
  misc_feature 1..36: note = Synthetic oligonucleotide
  source 1..36: mol_type = other DNA

SEQ ID NO: 25592 - DNA, 36 bp, synthetic construct
  misc_feature 1..36: note = Synthetic oligonucleotide
  source 1..36: mol_type = other DNA
attgtaactgaccgatgcccgcccgcaattcacaac

SEQ ID NO: 25593 - DNA, 36 bp, synthetic construct; identical to SEQ ID NO: 25592
  misc_feature 1..36: note = Synthetic oligonucleotide
  source 1..36: mol_type = other DNA

SEQ ID NO: 25594 - DNA, 37 bp, synthetic construct
  misc_feature 1..37: note = Synthetic oligonucleotide
  source 1..37: mol_type = other DNA
attgtaactgaccgatgcccgcccgcaattcacaacg

SEQ ID NO: 25595 - DNA, 36 bp, synthetic construct
  misc_feature 1..36: note = Synthetic oligonucleotide
  source 1..36: mol_type = other DNA
attgtaactgacctgtgcctgagtgcaagccacaac

SEQ ID NO: 25596 - DNA, 36 bp, synthetic construct; identical to SEQ ID NO: 25595
  misc_feature 1..36: note = Synthetic oligonucleotide
  source 1..36: mol_type = other DNA

SEQ ID NO: 25597 - DNA, 36 bp, synthetic construct; identical to SEQ ID NO: 11408
  misc_feature 1..36: note = Synthetic oligonucleotide
  source 1..36: mol_type = other DNA

SEQ ID NO: 25598 - DNA, 36 bp, synthetic construct; identical to SEQ ID NO: 11408
  misc_feature 1..36: note = Synthetic oligonucleotide
  source 1..36: mol_type = other DNA

SEQ ID NO: 25599 - DNA, 36 bp, synthetic construct
  misc_feature 1..36: note = Synthetic oligonucleotide
  source 1..36: mol_type = other DNA
attgtaactgatccgcgtctgagggcaagtcacaac

SEQ ID NO: 25600 - DNA, 36 bp, synthetic construct; identical to SEQ ID NO: 25599
  misc_feature 1..36: note = Synthetic oligonucleotide
  source 1..36: mol_type = other DNA

SEQ ID NO: 25601 - DNA, 36 bp, synthetic construct; identical to SEQ ID NO: 25599
  misc_feature 1..36: note = Synthetic oligonucleotide
  source 1..36: mol_type = other DNA

SEQ ID NO: 25602 - DNA, 36 bp, synthetic construct; identical to SEQ ID NO: 25599
  misc_feature 1..36: note = Synthetic oligonucleotide
  source 1..36: mol_type = other DNA

SEQ ID NO: 25603 - DNA, 36 bp, synthetic construct; identical to SEQ ID NO: 25599
  misc_feature 1..36: note = Synthetic oligonucleotide
  source 1..36: mol_type = other DNA

SEQ ID NO: 25604 - DNA, 35 bp, synthetic construct
  misc_feature 1..35: note = Synthetic oligonucleotide
  source 1..35: mol_type = other DNA
attgtaactgatccgcgtctgagtgcaagccacaa

SEQ ID NO: 25605 - DNA, 36 bp, synthetic construct; identical to SEQ ID NO: 11415
  misc_feature 1..36: note = Synthetic oligonucleotide
  source 1..36: mol_type = other DNA

SEQ ID NO: 25606 - DNA, 36 bp, synthetic construct; identical to SEQ ID NO: 11417
  misc_feature 1..36: note = Synthetic oligonucleotide
  source 1..36: mol_type = other DNA

SEQ ID NO: 25607 - DNA, 37 bp, synthetic construct; identical to SEQ ID NO: 11419
  misc_feature 1..37: note = Synthetic oligonucleotide
  source 1..37: mol_type = other DNA

SEQ ID NO: 25608 - DNA, 38 bp, synthetic construct
  misc_feature 1..38: note = Synthetic oligonucleotide
  source 1..38: mol_type = other DNA
attgtaagccctacccacatcaaaggctagagtgaaag

SEQ ID NO: 25609 - DNA, 37 bp, synthetic construct
  misc_feature 1..37: note = Synthetic oligonucleotide
  source 1..37: mol_type = other DNA
attgtaatgcatccggggtgagagagggagctacaac

SEQ ID NO: 25610 - DNA, 37 bp, synthetic construct; identical to SEQ ID NO: 25609
  misc_feature 1..37: note = Synthetic oligonucleotide
  source 1..37: mol_type = other DNA

SEQ ID NO: 25611 - DNA, 27 bp, synthetic construct
  misc_feature 1..27: note = Synthetic oligonucleotide
  source 1..27: mol_type = other DNA
attgtaattgcgagataaagttactta

SEQ ID NO: 25612 - DNA, 29 bp, synthetic construct
  misc_feature 1..29: note = Synthetic oligonucleotide
  source 1..29: mol_type = other DNA
attgtaattgcgagataaagttacttaaa

SEQ ID NO: 25613 - DNA, 37 bp, synthetic construct
  misc_feature 1..37: note = Synthetic oligonucleotide
  source 1..37: mol_type = other DNA
attgtaattgcgagataaagttacttaaattgaaagc

SEQ ID NO: 25614 - DNA, 36 bp, synthetic construct; identical to SEQ ID NO: 11426
  misc_feature 1..36: note = Synthetic oligonucleotide
  source 1..36: mol_type = other DNA

SEQ ID NO: 25615 - DNA, 36 bp, synthetic construct
  misc_feature 1..36: note = Synthetic oligonucleotide
  source 1..36: mol_type = other DNA
attgtaccaactggggaaatgagatcgcacgaagac

SEQ ID NO: 25616 - DNA, 36 bp, synthetic construct
  misc_feature 1..36: note = Synthetic oligonucleotide
  source 1..36: mol_type = other DNA
attgtaccaactggggaattgagaccgcgcgaagac

SEQ ID NO: 25617 - DNA, 36 bp, synthetic construct
  misc_feature 1..36: note = Synthetic oligonucleotide
  source 1..36: mol_type = other DNA
attgtaccaactggggaattgagcgggcgccaagac

SEQ ID NO: 25618 - DNA, 36 bp, synthetic construct; identical to SEQ ID NO: 11429
  misc_feature 1..36: note = Synthetic oligonucleotide
  source 1..36: mol_type = other DNA

SEQ ID NO: 25619 - DNA, 36 bp, synthetic construct; identical to SEQ ID NO: 11429
  misc_feature 1..36: note = Synthetic oligonucleotide
  source 1..36: mol_type = other DNA

SEQ ID NO: 25620 - DNA, 36 bp, synthetic construct
  misc_feature 1..36: note = Synthetic oligonucleotide
  source 1..36: mol_type = other DNA
attgtaccaactggggagttggaagggcgccaagac

SEQ ID NO: 25621 - DNA, 29 bp, synthetic construct
  misc_feature 1..29: note = Synthetic oligonucleotide
  source 1..29: mol_type = other DNA
attgtaccacacaaatgcctgcccgcaag

SEQ ID NO: 25622 - DNA, 36 bp, synthetic construct; identical to SEQ ID NO: 11431
  misc_feature 1..36: note = Synthetic oligonucleotide
  source 1..36: mol_type = other DNA

SEQ ID NO: 25623 - DNA, 36 bp, synthetic construct
  misc_feature 1..36: note = Synthetic oligonucleotide
  source 1..36: mol_type = other DNA
attgtaccagagcagagattctcggcaagccccagc

SEQ ID NO: 25624 - DNA, 36 bp, synthetic construct; identical to SEQ ID NO: 11433
  misc_feature 1..36: note = Synthetic oligonucleotide
  source 1..36: mol_type = other DNA

SEQ ID NO: 25625 - DNA, 36 bp, synthetic construct; identical to SEQ ID NO: 11436
  misc_feature 1..36: note = Synthetic oligonucleotide
  source 1..36: mol_type = other DNA

SEQ ID NO: 25626 - DNA, 36 bp, synthetic construct
  misc_feature 1..36: note = Synthetic oligonucleotide
  source 1..36: mol_type = other DNA
attgtaccagagcggcgcttcccgaccaactacagt

SEQ ID NO: 25627 - DNA, 36 bp, synthetic construct; identical to SEQ ID NO: 25626
  misc_feature 1..36: note = Synthetic oligonucleotide
  source 1..36: mol_type = other DNA

SEQ ID NO: 25628 - DNA, 37 bp, synthetic construct
  misc_feature 1..37: note = Synthetic oligonucleotide
  source 1..37: mol_type = other DNA
attgtaccagcccgcgaagccaaagctagagtgaaag

SEQ ID NO: 25629 - DNA, 36 bp, synthetic construct
  misc_feature 1..36: note = Synthetic oligonucleotide
  source 1..36: mol_type = other DNA
attgtacccgaccaagggctacctgcaattcacaac

SEQ ID NO: 25630 - DNA, 32 bp, synthetic construct
  misc_feature 1..32: note = Synthetic oligonucleotide
  source 1..32: mol_type = other DNA
attgtacccgaccaagggttacctgcaattca

SEQ ID NO: 25631 - DNA, 36 bp, synthetic construct
  misc_feature 1..36: note = Synthetic oligonucleotide
  source 1..36: mol_type = other DNA
attgtacccgagcggcgattgcccgcaagctccagc

SEQ ID NO: 25632 - DNA, 36 bp, synthetic construct; identical to SEQ ID NO: 11449
  misc_feature 1..36: note = Synthetic oligonucleotide
  source 1..36: mol_type = other DNA

SEQ ID NO: 25633 - DNA, 36 bp, synthetic construct
  misc_feature 1..36: note = Synthetic oligonucleotide
  source 1..36: mol_type = other DNA
attgtacctgaaagatgtctgagggctgttcacaac

SEQ ID NO: 25634 - DNA, 36 bp, synthetic construct
  misc_feature 1..36: note = Synthetic oligonucleotide
  source 1..36: mol_type = other DNA
attgtacctgagcgatttttgttgtcaagccccagc

SEQ ID NO: 25635 - DNA, 36 bp, synthetic construct
  misc_feature 1..36: note = Synthetic oligonucleotide
  source 1..36: mol_type = other DNA
attgtacctgagtcgttgttctgatccaactacagc

SEQ ID NO: 25636 - DNA, 36 bp, synthetic construct; identical to SEQ ID NO: 11458
  misc_feature 1..36: note = Synthetic oligonucleotide
  source 1..36: mol_type = other DNA

SEQ ID NO: 25637 - DNA, 36 bp, synthetic construct
  misc_feature 1..36: note = Synthetic oligonucleotide
  source 1..36: mol_type = other DNA
attgtactcaaacggggattgcagtcaaaccacagc

SEQ ID NO: 25638 - DNA, 36 bp, synthetic construct
  misc_feature 1..36: note = Synthetic oligonucleotide
  source 1..36: mol_type = other DNA
attgtactgtgccttattttggattcaaggcaaaac

SEQ ID NO: 25639 - DNA, 36 bp, synthetic construct; identical to SEQ ID NO: 25638
  misc_feature 1..36: note = Synthetic oligonucleotide
  source 1..36: mol_type = other DNA

SEQ ID NO: 25640 - DNA, 36 bp, synthetic construct; identical to SEQ ID NO: 25638
  misc_feature 1..36: note = Synthetic oligonucleotide
  source 1..36: mol_type = other DNA

SEQ ID NO: 25641 - DNA, 36 bp, synthetic construct; identical to SEQ ID NO: 25638
  misc_feature 1..36: note = Synthetic oligonucleotide
  source 1..36: mol_type = other DNA

SEQ ID NO: 25642 - DNA, 36 bp, synthetic construct
  misc_feature 1..36: note = Synthetic oligonucleotide
  source 1..36: mol_type = other DNA
attgtacttgagccgcagttcctgtcaagccccaac

SEQ ID NO: 25643 - DNA, 36 bp, synthetic construct; identical to SEQ ID NO: 25642
  misc_feature 1..36: note = Synthetic oligonucleotide
  source 1..36: mol_type = other DNA

SEQ ID NO: 25644 - DNA, 36 bp, synthetic construct; identical to SEQ ID NO: 25642
  misc_feature 1..36: note = Synthetic oligonucleotide
  source 1..36: mol_type = other DNA

SEQ ID NO: 25645 - DNA, 36 bp, synthetic construct; identical to SEQ ID NO: 25642
  misc_feature 1..36: note = Synthetic oligonucleotide
  source 1..36: mol_type = other DNA

SEQ ID NO: 25646 - DNA, 36 bp, synthetic construct; identical to SEQ ID NO: 25642
  misc_feature 1..36: note = Synthetic oligonucleotide
  source 1..36: mol_type = other DNA

SEQ ID NO: 25647 - DNA, 37 bp, synthetic construct
  misc_feature 1..37: note = Synthetic oligonucleotide
  source 1..37: mol_type = other DNA
attgtacttgagccgcagttcctgtcaagccccaacc

SEQ ID NO: 25648 - DNA, 38 bp, synthetic construct
  misc_feature 1..38: note = Synthetic oligonucleotide
  source 1..38: mol_type = other DNA
attgtacttgagccgcagttcctgtcaagccccaactg

SEQ ID NO: 25649 - DNA, 36 bp, synthetic construct
  misc_feature 1..36: note = Synthetic oligonucleotide
  source 1..36: mol_type = other DNA
attgtacttgagcggattttgttgtcaagccccagc

SEQ ID NO: 25650 - DNA, 36 bp, synthetic construct; identical to SEQ ID NO: 25649
  misc_feature 1..36: note = Synthetic oligonucleotide
  source 1..36: mol_type = other DNA

SEQ ID NO: 25651 - DNA, 36 bp, synthetic construct; identical to SEQ ID NO: 11461
  misc_feature 1..36: note = Synthetic oligonucleotide
  source 1..36: mol_type = other DNA

SEQ ID NO: 25652 - DNA, 36 bp, synthetic construct; identical to SEQ ID NO: 11461
  misc_feature 1..36: note = Synthetic oligonucleotide
  source 1..36: mol_type = other DNA

SEQ ID NO: 25653 - DNA, 37 bp, synthetic construct; identical to SEQ ID NO: 11463
  misc_feature 1..37: note = Synthetic oligonucleotide
  source 1..37: mol_type = other DNA

SEQ ID NO: 25654 - DNA, 36 bp, synthetic construct; identical to SEQ ID NO: 11464
  misc_feature 1..36: note = Synthetic oligonucleotide
  source 1..36: mol_type = other DNA

SEQ ID NO: 25655 - DNA, 36 bp, synthetic construct; identical to SEQ ID NO: 11469
  misc_feature 1..36: note = Synthetic oligonucleotide
  source 1..36: mol_type = other DNA

SEQ ID NO: 25656 - DNA, 36 bp, synthetic construct; identical to SEQ ID NO: 11469
  misc_feature 1..36: note = Synthetic oligonucleotide
  source 1..36: mol_type = other DNA

SEQ ID NO: 25657 - DNA, 36 bp, synthetic construct; identical to SEQ ID NO: 11469
  misc_feature 1..36: note = Synthetic oligonucleotide
  source 1..36: mol_type = other DNA

SEQ ID NO: 25658 - DNA, 36 bp, synthetic construct; identical to SEQ ID NO: 11469
  misc_feature 1..36: note = Synthetic oligonucleotide
  source 1..36: mol_type = other DNA

SEQ ID NO: 25659 - DNA, 31 bp, synthetic construct
  misc_feature 1..31: note = Synthetic oligonucleotide
  source 1..31: mol_type = other DNA
attgtagcacgctggaaaaaggtggggaatc

SEQ ID NO: 25660 - DNA, 36 bp, synthetic construct
  misc_feature 1..36: note = Synthetic oligonucleotide
  source 1..36: mol_type = other DNA
attgtagcacgctggaaaaaggtggggaatcaaaac

SEQ ID NO: 25661 - DNA, 36 bp, synthetic construct; identical to SEQ ID NO: 25660
  misc_feature 1..36: note = Synthetic oligonucleotide
  source 1..36: mol_type = other DNA

SEQ ID NO: 25662 - DNA, 36 bp, synthetic construct; identical to SEQ ID NO: 25660
  misc_feature 1..36: note = Synthetic oligonucleotide
  source 1..36: mol_type = other DNA

SEQ ID NO: 25663 - DNA, 33 bp, synthetic construct
  misc_feature 1..33: note = Synthetic oligonucleotide
  source 1..33: mol_type = other DNA
attgtagcactgcgaaatgagaaagggagctac

SEQ ID NO: 25664 - DNA, 36 bp, synthetic construct; identical to SEQ ID NO: 11473
  misc_feature 1..36: note = Synthetic oligonucleotide
  source 1..36: mol_type = other DNA

SEQ ID NO: 25665 - DNA, 36 bp, synthetic construct; identical to SEQ ID NO: 11473
  misc_feature 1..36: note = Synthetic oligonucleotide
  source 1..36: mol_type = other DNA

SEQ ID NO: 25666 - DNA, 36 bp, synthetic construct; identical to SEQ ID NO: 11473
  misc_feature 1..36: note = Synthetic oligonucleotide
  source 1..36: mol_type = other DNA

SEQ ID NO: 25667 - DNA, 36 bp, synthetic construct; identical to SEQ ID NO: 11473
  misc_feature 1..36: note = Synthetic oligonucleotide
  source 1..36: mol_type = other DNA

SEQ ID NO: 25668 - DNA, 36 bp, synthetic construct; identical to SEQ ID NO: 11473
  misc_feature 1..36: note = Synthetic oligonucleotide
  source 1..36: mol_type = other DNA

SEQ ID NO: 25669 - DNA, 36 bp, synthetic construct; identical to SEQ ID NO: 11473
  misc_feature 1..36: note = Synthetic oligonucleotide
  source 1..36: mol_type = other DNA

SEQ ID NO: 25670 - DNA, 36 bp, synthetic construct; identical to SEQ ID NO: 11473
  misc_feature 1..36: note = Synthetic oligonucleotide
  source 1..36: mol_type = other DNA

SEQ ID NO: 25671 - DNA, 36 bp, synthetic construct; identical to SEQ ID NO: 11473
  misc_feature 1..36: note = Synthetic oligonucleotide
  source 1..36: mol_type = other DNA

SEQ ID NO: 25672 - DNA, 36 bp, synthetic construct; identical to SEQ ID NO: 11473
  misc_feature 1..36: note = Synthetic oligonucleotide
  source 1..36: mol_type = other DNA

SEQ ID NO: 25673 - DNA, 36 bp, synthetic construct; identical to SEQ ID NO: 11473
  misc_feature 1..36: note = Synthetic oligonucleotide
  source 1..36: mol_type = other DNA

SEQ ID NO: 25674 - DNA, 36 bp, synthetic construct; identical to SEQ ID NO: 11473
  misc_feature 1..36: note = Synthetic oligonucleotide
  source 1..36: mol_type = other DNA

SEQ ID NO: 25675 - DNA, 36 bp, synthetic construct; identical to SEQ ID NO: 11473
  misc_feature 1..36: note = Synthetic oligonucleotide
  source 1..36: mol_type = other DNA

SEQ ID NO: 25676 - DNA, 36 bp, synthetic construct; identical to SEQ ID NO: 11473
  misc_feature 1..36: note = Synthetic oligonucleotide
  source 1..36: mol_type = other DNA

SEQ ID NO: 25677 - DNA, 36 bp, synthetic construct; identical to SEQ ID NO: 11473
  misc_feature 1..36: note = Synthetic oligonucleotide
  source 1..36: mol_type = other DNA

SEQ ID NO: 25678 - DNA, 36 bp, synthetic construct; identical to SEQ ID NO: 11474
  misc_feature 1..36: note = Synthetic oligonucleotide
  source 1..36: mol_type = other DNA

SEQ ID NO: 25679 - DNA, 36 bp, synthetic construct; identical to SEQ ID NO: 11474
  misc_feature 1..36: note = Synthetic oligonucleotide
  source 1..36: mol_type = other DNA

SEQ ID NO: 25680 - DNA, 36 bp, synthetic construct; identical to SEQ ID NO: 11474
  misc_feature 1..36: note = Synthetic oligonucleotide
  source 1..36: mol_type = other DNA

SEQ ID NO: 25681 - DNA, 36 bp, synthetic construct; identical to SEQ ID NO: 11474
  misc_feature 1..36: note = Synthetic oligonucleotide
  source 1..36: mol_type = other DNA

SEQ ID NO: 25682 - DNA, 36 bp, synthetic construct; identical to SEQ ID NO: 11474
  misc_feature 1..36: note = Synthetic oligonucleotide
  source 1..36: mol_type = other DNA

SEQ ID NO: 25683 - DNA, 36 bp, synthetic construct; identical to SEQ ID NO: 11474
  misc_feature 1..36: note = Synthetic oligonucleotide
  source 1..36: mol_type = other DNA

SEQ ID NO: 25684 - DNA, 36 bp, synthetic construct; identical to SEQ ID NO: 11474
  misc_feature 1..36: note = Synthetic oligonucleotide
  source 1..36: mol_type = other DNA

SEQ ID NO: 25685 - DNA, 36 bp, synthetic construct; identical to SEQ ID NO: 11474
  misc_feature 1..36: note = Synthetic oligonucleotide
  source 1..36: mol_type = other DNA

SEQ ID NO: 25686 - DNA, 36 bp, synthetic construct; identical to SEQ ID NO: 11474
  misc_feature 1..36: note = Synthetic oligonucleotide
  source 1..36: mol_type = other DNA

SEQ ID NO: 25687 - DNA, 36 bp, synthetic construct; identical to SEQ ID NO: 11474
  misc_feature 1..36: note = Synthetic oligonucleotide
  source 1..36: mol_type = other DNA

SEQ ID NO: 25688 - DNA, 36 bp, synthetic construct; identical to SEQ ID NO: 11474
  misc_feature 1..36: note = Synthetic oligonucleotide
  source 1..36: mol_type = other DNA

SEQ ID NO: 25689 - DNA, 36 bp, synthetic construct; identical to SEQ ID NO: 11474
  misc_feature 1..36: note = Synthetic oligonucleotide
  source 1..36: mol_type = other DNA

SEQ ID NO: 25690 - DNA, 36 bp, synthetic construct; identical to SEQ ID NO: 11474
  misc_feature 1..36: note = Synthetic oligonucleotide
  source 1..36: mol_type = other DNA

SEQ ID NO: 25691 - DNA, 36 bp, synthetic construct; identical to SEQ ID NO: 11474
  misc_feature 1..36: note = Synthetic oligonucleotide
  source 1..36: mol_type = other DNA

SEQ ID NO: 25692 - DNA, 36 bp, synthetic construct
  misc_feature 1..36: note = Synthetic oligonucleotide
  source 1..36: mol_type = other DNA
attgtagcagattttgattggtatggaagccgtaac

SEQ ID NO: 25693 - DNA, 36 bp, synthetic construct; identical to SEQ ID NO: 11478
  misc_feature 1..36: note = Synthetic oligonucleotide
  source 1..36: mol_type = other DNA

SEQ ID NO: 25694 - DNA, 36 bp, synthetic construct
  misc_feature 1..36: note = Synthetic oligonucleotide
  source 1..36: mol_type = other DNA
attgtagcagttcaaaattcgaggtccagccgcaac

SEQ ID NO: 25695 - DNA, 36 bp, synthetic construct; identical to SEQ ID NO: 11479
  misc_feature 1..36: note = Synthetic oligonucleotide
  source 1..36: mol_type = other DNA

SEQ ID NO: 25696 - DNA, 36 bp, synthetic construct; identical to SEQ ID NO: 11479
  misc_feature 1..36: note = Synthetic oligonucleotide
  source 1..36: mol_type = other DNA

SEQ ID NO: 25697 - DNA, 36 bp, synthetic construct
  misc_feature 1..36: note = Synthetic oligonucleotide
  source 1..36: mol_type = other DNA
attgtagccatccggggtgagagaggaaactacaac

SEQ ID NO: 25698 - DNA, 36 bp, synthetic construct
  misc_feature 1..36: note = Synthetic oligonucleotide
  source 1..36: mol_type = other DNA
attgtagccatccggggtgagagagggaactacaac

SEQ ID NO: 25699 - DNA, 37 bp, synthetic construct
  misc_feature 1..37: note = Synthetic oligonucleotide
  source 1..37: mol_type = other DNA
attgtagccgatcagaattcgcggtcaggccgcaact

SEQ ID NO: 25700 - DNA, 37 bp, synthetic construct; identical to SEQ ID NO: 25699
  misc_feature 1..37: note = Synthetic oligonucleotide
  source 1..37: mol_type = other DNA

SEQ ID NO: 25701 - DNA, 36 bp, synthetic construct
  misc_feature 1..36: note = Synthetic oligonucleotide
  source 1..36: mol_type = other DNA
attgtagccgctgggggatcggggtccagccgcaac

SEQ ID NO: 25702 - DNA, 36 bp, synthetic construct
  misc_feature 1..36: note = Synthetic oligonucleotide
  source 1..36: mol_type = other DNA
attgtagccgcttagagatcgagggccagccgcaac

SEQ ID NO: 25703 - DNA, 36 bp, synthetic construct; identical to SEQ ID NO: 11487
  misc_feature 1..36: note = Synthetic oligonucleotide
  source 1..36: mol_type = other DNA

SEQ ID NO: 25704 - DNA, 36 bp, synthetic construct
  misc_feature 1..36: note = Synthetic oligonucleotide
  source 1..36: mol_type = other DNA
attgtagcgaaacgagagacggccgcaatccgcagc

SEQ ID NO: 25705 - DNA, 36 bp, synthetic construct
  misc_feature 1..36: note = Synthetic oligonucleotide
  source 1..36: mol_type = other DNA
attgtagcggtctggtggttgagggccaaccgcaac

SEQ ID NO: 25706 - DNA, 36 bp, synthetic construct; identical to SEQ ID NO: 11489
  misc_feature 1..36: note = Synthetic oligonucleotide
  source 1..36: mol_type = other DNA

SEQ ID NO: 25707 - DNA, 36 bp, synthetic construct; identical to SEQ ID NO: 11490
  misc_feature 1..36: note = Synthetic oligonucleotide
  source 1..36: mol_type = other DNA

SEQ ID NO: 25708 - DNA, 36 bp, synthetic construct
  misc_feature 1..36: note = Synthetic oligonucleotide
  source 1..36: mol_type = other DNA
attgtagctatccggggtgagaacgggaactacaac

SEQ ID NO: 25709 - DNA, 36 bp, synthetic construct
  misc_feature 1..36: note = Synthetic oligonucleotide
  source 1..36: mol_type = other DNA
attgtagctatccggggtgagagagggaactacaac

SEQ ID NO: 25710 - DNA, 36 bp, synthetic construct; identical to SEQ ID NO: 11492
  misc_feature 1..36: note = Synthetic oligonucleotide
  source 1..36: mol_type = other DNA

SEQ ID NO: 25711 - DNA, 36 bp, synthetic construct; identical to SEQ ID NO: 11492
  misc_feature 1..36: note = Synthetic oligonucleotide
  source 1..36: mol_type = other DNA

SEQ ID NO: 25712 - DNA, 36 bp, synthetic construct; identical to SEQ ID NO: 11492
  misc_feature 1..36: note = Synthetic oligonucleotide
  source 1..36: mol_type = other DNA

SEQ ID NO: 25713 - DNA, 36 bp, synthetic construct; identical to SEQ ID NO: 11492
  misc_feature 1..36: note = Synthetic oligonucleotide
  source 1..36: mol_type = other DNA

SEQ ID NO: 25714 - DNA, 36 bp, synthetic construct
  misc_feature 1..36: note = Synthetic oligonucleotide
  source 1..36: mol_type = other DNA
attgtagctccctttctcatttcgcagtgctacaat

SEQ ID NO: 25715 - DNA, 36 bp, synthetic construct
  misc_feature 1..36: note = Synthetic oligonucleotide
  source 1..36: mol_type = other DNA
attgtagctgtccggggtgagaacgggaactacaac

SEQ ID NO: 25716 - DNA, 19 bp, synthetic construct
  misc_feature 1..19: note = Synthetic oligonucleotide
  source 1..19: mol_type = other DNA
attgtagctgttcaaaatt

SEQ ID NO: 25717 - DNA, 36 bp, synthetic construct; identical to SEQ ID NO: 11496
  misc_feature 1..36: note = Synthetic oligonucleotide
  source 1..36: mol_type = other DNA

SEQ ID NO: 25718 - DNA, 36 bp, synthetic construct; identical to SEQ ID NO: 11496
  misc_feature 1..36: note = Synthetic oligonucleotide
  source 1..36: mol_type = other DNA

SEQ ID NO: 25719 - DNA, 36 bp, synthetic construct; identical to SEQ ID NO: 11496
  misc_feature 1..36: note = Synthetic oligonucleotide
  source 1..36: mol_type = other DNA

SEQ ID NO: 25720 - DNA, 36 bp, synthetic construct; identical to SEQ ID NO: 11496
  misc_feature 1..36: note = Synthetic oligonucleotide
  source 1..36: mol_type = other DNA

SEQ ID NO: 25721 - DNA, 36 bp, synthetic construct
  misc_feature 1..36: note = Synthetic oligonucleotide
  source 1..36: mol_type = other DNA
attgtagcttaccggggtgagagagggagctacaac

SEQ ID NO: 25722 - DNA, 36 bp, synthetic construct; identical to SEQ ID NO: 11498
  misc_feature 1..36: note = Synthetic oligonucleotide
  source 1..36: mol_type = other DNA

SEQ ID NO: 25723 - DNA, 36 bp, synthetic construct; identical to SEQ ID NO: 11498
  misc_feature 1..36: note = Synthetic oligonucleotide
  source 1..36: mol_type = other DNA

SEQ ID NO: 25724 - DNA, 36 bp, synthetic construct; identical to SEQ ID NO: 11498
  misc_feature 1..36: note = Synthetic oligonucleotide
  source 1..36: mol_type = other DNA

SEQ ID NO: 25725 - DNA, 36 bp, synthetic construct; identical to SEQ ID NO: 11498
  misc_feature 1..36: note = Synthetic oligonucleotide
  source 1..36: mol_type = other DNA

SEQ ID NO: 25726 - DNA, 36 bp, synthetic construct; identical to SEQ ID NO: 11498
  misc_feature 1..36: note = Synthetic oligonucleotide
  source 1..36: mol_type = other DNA

SEQ ID NO: 25727 - DNA, 36 bp, synthetic construct
  misc_feature 1..36: note = Synthetic oligonucleotide
  source 1..36: mol_type = other DNA
attgtagctttccggggtgagagtgggagctacagc

SEQ ID NO: 25728 - DNA, 38 bp, synthetic construct
  misc_feature 1..38: note = Synthetic oligonucleotide
  source 1..38: mol_type = other DNA
attgtaggtcccgcccatcagaaaggctagagtgaaag

SEQ ID NO: 25729 - DNA, 36 bp, synthetic construct; identical to SEQ ID NO: 11500
  misc_feature 1..36: note = Synthetic oligonucleotide
  source 1..36: mol_type = other DNA

SEQ ID NO: 25730 - DNA, 37 bp, synthetic construct; identical to SEQ ID NO: 11503
  misc_feature 1..37: note = Synthetic oligonucleotide
  source 1..37: mol_type = other DNA

SEQ ID NO: 25731 - DNA, 37 bp, synthetic construct; identical to SEQ ID NO: 11503
  misc_feature 1..37: note = Synthetic oligonucleotide
  source 1..37: mol_type = other DNA

SEQ ID NO: 25732 - DNA, 37 bp, synthetic construct; identical to SEQ ID NO: 11508
  misc_feature 1..37: note = Synthetic oligonucleotide
  source 1..37: mol_type = other DNA

SEQ ID NO: 25733 - DNA, 36 bp, synthetic construct
  misc_feature 1..36: note = Synthetic oligonucleotide
  source 1..36: mol_type = other DNA
attgtagttttccggggtgagatagggaactacaac

SEQ ID NO: 25734 - DNA, 36 bp, synthetic construct
  misc_feature 1..36: note = Synthetic oligonucleotide
  source 1..36: mol_type = other DNA
attgtatatcttttgattcctacatcaaaccacaac

SEQ ID NO: 25735 - DNA, 36 bp, synthetic construct; identical to SEQ ID NO: 25734
  misc_feature 1..36: note = Synthetic oligonucleotide
  source 1..36: mol_type = other DNA

SEQ ID NO: 25736 - DNA, 36 bp, synthetic construct
  misc_feature 1..36: note = Synthetic oligonucleotide
  source 1..36: mol_type = other DNA
attgtatcacataatggtttgtaggggtattaaaac

SEQ ID NO: 25737 - DNA, 36 bp, synthetic construct
  misc_feature 1..36: note = Synthetic oligonucleotide
  source 1..36: mol_type = other DNA
attgtatcacataggggtatgtaggggtcttaaaac

SEQ ID NO: 25738 - DNA, 36 bp, synthetic construct
  misc_feature 1..36: note = Synthetic oligonucleotide
  source 1..36: mol_type = other DNA
attgtatcagatatgaatttgagatcaagttataac

SEQ ID NO: 25739 - DNA, 36 bp, synthetic construct
  misc_feature 1..36: note = Synthetic oligonucleotide
  source 1..36: mol_type = other DNA
attgtatcagatgttccgctggtgaggtatcggaac

SEQ ID NO: 25740 - DNA, 36 bp, synthetic construct; identical to SEQ ID NO: 25739
  misc_feature 1..36: note = Synthetic oligonucleotide
  source 1..36: mol_type = other DNA

SEQ ID NO: 25741 - DNA, 36 bp, synthetic construct; identical to SEQ ID NO: 25739
  misc_feature 1..36: note = Synthetic oligonucleotide
  source 1..36: mol_type = other DNA

SEQ ID NO: 25742 - DNA, 36 bp, synthetic construct
  misc_feature 1..36: note = Synthetic oligonucleotide
  source 1..36: mol_type = other DNA
attgtatcagcttgaggaatggcaacgcgctagggc

SEQ ID NO: 25743 - DNA, 36 bp, synthetic construct
  misc_feature 1..36: note = Synthetic oligonucleotide
  source 1..36: mol_type = other DNA
attgtatcaggtattccgacggtggggtatcggaac

SEQ ID NO: 25744 - DNA, 36 bp, synthetic construct
  misc_feature 1..36: note = Synthetic oligonucleotide
  source 1..36: mol_type = other DNA
attgtatcatattggttttgaatgtcaagttgcaac

SEQ ID NO: 25745 - DNA, 36 bp, synthetic construct
  misc_feature 1..36: note = Synthetic oligonucleotide
  source 1..36: mol_type = other DNA
attgtatcgcatagttgtttgtaggggtattaaaac

SEQ ID NO: 25746 - DNA, 36 bp, synthetic construct
  misc_feature 1..36: note = Synthetic oligonucleotide
  source 1..36: mol_type = other DNA
attgtatctaacgaatacctgaagccaagtcacaac

SEQ ID NO: 25747 - DNA, 36 bp, synthetic construct
  misc_feature 1..36: note = Synthetic oligonucleotide
  source 1..36: mol_type = other DNA
attgtatctaacgaatgcctaaagccaagtcacaac

SEQ ID NO: 25748 - DNA, 36 bp, synthetic construct; identical to SEQ ID NO: 11527
  misc_feature 1..36: note = Synthetic oligonucleotide
  source 1..36: mol_type = other DNA

SEQ ID NO: 25749 - DNA, 38 bp, synthetic construct
  misc_feature 1..38: note = Synthetic oligonucleotide
  source 1..38: mol_type = other DNA
attgtatctaacggatgcctgaagccaagccacaacgt

SEQ ID NO: 25750 - DNA, 36 bp, synthetic construct
  misc_feature 1..36: note = Synthetic oligonucleotide
  source 1..36: mol_type = other DNA
attgtatctctcttttcttctacagcaagccacaac

SEQ ID NO: 25751 - DNA, 36 bp, synthetic construct
  misc_feature 1..36: note = Synthetic oligonucleotide
  source 1..36: mol_type = other DNA
attgtatctgactgatgcctgcccgctttccacaac

SEQ ID NO: 25752 - DNA, 36 bp, synthetic construct; identical to SEQ ID NO: 25751
  misc_feature 1..36: note = Synthetic oligonucleotide
  source 1..36: mol_type = other DNA

SEQ ID NO: 25753 - DNA, 36 bp, synthetic construct; identical to SEQ ID NO: 25751
  misc_feature 1..36: note = Synthetic oligonucleotide
  source 1..36: mol_type = other DNA

SEQ ID NO: 25754 - DNA, 36 bp, synthetic construct; identical to SEQ ID NO: 25751
  misc_feature 1..36: note = Synthetic oligonucleotide
  source 1..36: mol_type = other DNA

SEQ ID NO: 25755 - DNA, 36 bp, synthetic construct
  misc_feature 1..36: note = Synthetic oligonucleotide
  source 1..36: mol_type = other DNA
attgtcgcccctcagaatttggaatcaaggcaaagc

SEQ ID NO: 25756 - DNA, 36 bp, synthetic construct
  misc_feature 1..36: note = Synthetic oligonucleotide
  source 1..36: mol_type = other DNA
attgtcttatatcttttttctacatcaaatcacaac

SEQ ID NO: 25757 - DNA, 38 bp, synthetic construct
  misc_feature 1..38: note = Synthetic oligonucleotide
  source 1..38: mol_type = other DNA
attgtgattagctttaaaattagtatctttgcattagc

SEQ ID NO: 25758 - DNA, 36 bp, synthetic construct
  misc_feature 1..36: note = Synthetic oligonucleotide
  source 1..36: mol_type = other DNA
attgtgattggcagggaatggccgctctgatacact

SEQ ID NO: 25759 - DNA, 36 bp, synthetic construct
  misc_feature 1..36: note = Synthetic oligonucleotide
  source 1..36: mol_type = other DNA
attgtgcaaagagcagatttggaatcaaggcaaagc

SEQ ID NO: 25760 - DNA, 29 bp, synthetic construct
  misc_feature 1..29: note = Synthetic oligonucleotide
  source 1..29: mol_type = other DNA
attgtgttctttgatagattgcatacaga

SEQ ID NO: 25761 - DNA, 30 bp, synthetic construct
  misc_feature 1..30: note = Synthetic oligonucleotide
  source 1..30: mol_type = other DNA
attgttatcaatcacaaaactataaaaatt

SEQ ID NO: 25762 - DNA, 31 bp, synthetic construct
  misc_feature 1..31: note = Synthetic oligonucleotide
  source 1..31: mol_type = other DNA
attgtttccagtggttcaaagatactaattt

SEQ ID NO: 25763 - DNA, 36 bp, synthetic construct
  misc_feature 1..36: note = Synthetic oligonucleotide
  source 1..36: mol_type = other DNA
attgtttttcacttcattttgtatgctaatcacaac

SEQ ID NO: 25764 - DNA, 36 bp, synthetic construct; identical to SEQ ID NO: 25763
  misc_feature 1..36: note = Synthetic oligonucleotide
  source 1..36: mol_type = other DNA

SEQ ID NO: 25765 - DNA, 30 bp, synthetic construct
  misc_feature 1..30: note = Synthetic oligonucleotide
  source 1..30: mol_type = other DNA
atttaaaaacaaatactgttaatacttcat

SEQ ID NO: 25766 - DNA, 30 bp, synthetic construct
  misc_feature 1..30: note = Synthetic oligonucleotide
  source 1..30: mol_type = other DNA
atttaaaatccagtatggatagatttatag

SEQ ID NO: 25767 - DNA, 30 bp, synthetic construct; identical to SEQ ID NO: 25766
  misc_feature 1..30: note = Synthetic oligonucleotide
  source 1..30: mol_type = other DNA

SEQ ID NO: 25768 - DNA, 28 bp, synthetic construct
  misc_feature 1..28: note = Synthetic oligonucleotide
  source 1..28: mol_type = other DNA
atttaatccctaacgggatttattatct

SEQ ID NO: 25769 - DNA, 36 bp, synthetic construct
  misc_feature 1..36: note = Synthetic oligonucleotide
  source 1..36: mol_type = other DNA
atttaattcaacttgaaaaactctacaagccccagc

SEQ ID NO: 25770 - DNA, 30 bp, synthetic construct
  misc_feature 1..30: note = Synthetic oligonucleotide
  source 1..30: mol_type = other DNA
atttacattacactttgctactattaatac

SEQ ID NO: 25771 - DNA, 30 bp, synthetic construct
  misc_feature 1..30: note = Synthetic oligonucleotide
  source 1..30: mol_type = other DNA
atttacattccactatgtatctattaaaac

SEQ ID NO: 25772 - DNA, 30 bp, synthetic construct; identical to SEQ ID NO: 25771
  misc_feature 1..30: note = Synthetic oligonucleotide
  source 1..30: mol_type = other DNA

SEQ ID NO: 25773 - DNA, 33 bp, synthetic construct
  misc_feature 1..33: note = Synthetic oligonucleotide
  source 1..33: mol_type = other DNA
atttcaacccacgcgccccttgcggggcgcgac

SEQ ID NO: 25774 - DNA, 32 bp, synthetic construct
  misc_feature 1..32: note = Synthetic oligonucleotide
  source 1..32: mol_type = other DNA
atttcaatacacgctcctctgtgaggagcgac

SEQ ID NO: 25775 - DNA, 38 bp, synthetic construct
  misc_feature 1..38: note = Synthetic oligonucleotide
  source 1..38: mol_type = other DNA
atttcagccgcgcgcgcggctcaatgcaagactgaaac

SEQ ID NO: 25776 - DNA, 38 bp, synthetic construct
  misc_feature 1..38: note = Synthetic oligonucleotide
  source 1..38: mol_type = other DNA
atttcagccgcgcgcgcggctgtagtcaacactgaaag

SEQ ID NO: 25777 - DNA, 36 bp, synthetic construct
  misc_feature 1..36: note = Synthetic oligonucleotide
  source 1..36: mol_type = other DNA
atttcagtactattcaatataacactactgtaaaac

SEQ ID NO: 25778 - DNA, 36 bp, synthetic construct
  misc_feature 1..36: note = Synthetic oligonucleotide
  source 1..36: mol_type = other DNA
atttcagtttactagaaaaagtggtcggcctgcaac

SEQ ID NO: 25779 - DNA, 36 bp, synthetic construct
  misc_feature 1..36: note = Synthetic oligonucleotide
  source 1..36: mol_type = other DNA
atttcattttagtatctttgaagtatcggaaacatc

SEQ ID NO: 25780 - DNA, 36 bp, synthetic construct
  misc_feature 1..36: note = Synthetic oligonucleotide
  source 1..36: mol_type = other DNA
atttgagtcccctataaaattacactgctctcaaac

SEQ ID NO: 25781 - DNA, 36 bp, synthetic construct
  misc_feature 1..36: note = Synthetic oligonucleotide
  source 1..36: mol_type = other DNA
atttgagtcccttattaaattacactactctcaaac

SEQ ID NO: 25782 - DNA, 20 bp, synthetic construct
  misc_feature 1..20: note = Synthetic oligonucleotide
  source 1..20: mol_type = other DNA
attttaactcagaggggttt

SEQ ID NO: 25783 - DNA, 36 bp, synthetic construct
  misc_feature 1..36: note = Synthetic oligonucleotide
  source 1..36: mol_type = other DNA
attttaactgattgagatatgtgctgtggccggaac

SEQ ID NO: 25784 - DNA, 36 bp, synthetic construct
  misc_feature 1..36: note = Synthetic oligonucleotide
  source 1..36: mol_type = other DNA
attttaattcagttcaaaattacacaaccctaaaac

SEQ ID NO: 25785 - DNA, 36 bp, synthetic construct; identical to SEQ ID NO: 11560
  misc_feature 1..36: note = Synthetic oligonucleotide
  source 1..36: mol_type = other DNA

SEQ ID NO: 25786 - DNA, 36 bp, synthetic construct; identical to SEQ ID NO: 11560
  misc_feature 1..36: note = Synthetic oligonucleotide
  source 1..36: mol_type = other DNA

SEQ ID NO: 25787 - DNA, 36 bp, synthetic construct
  misc_feature 1..36: note = Synthetic oligonucleotide
  source 1..36: mol_type = other DNA
attttacagtcacgtaaattattcagttactaaaat

SEQ ID NO: 25788 - DNA, 36 bp, synthetic construct; identical to SEQ ID NO: 25787
  misc_feature 1..36: note = Synthetic oligonucleotide
  source 1..36: mol_type = other DNA

SEQ ID NO: 25789 - DNA, 36 bp, synthetic construct
  misc_feature 1..36: note = Synthetic oligonucleotide
  source 1..36: mol_type = other DNA
attttacagtcacgtaatttgtttaggtactaaaat

SEQ ID NO: 25790 - DNA, 36 bp, synthetic construct
  misc_feature 1..36: note = Synthetic oligonucleotide
  source 1..36: mol_type = other DNA
attttacatcaatgggatatgcgctctgaccggaac

SEQ ID NO: 25791 - DNA, 36 bp, synthetic construct
  misc_feature 1..36: note = Synthetic oligonucleotide
  source 1..36: mol_type = other DNA
attttaccagacctgtgcttgcgagcaactcataac

SEQ ID NO: 25792 - DNA, 36 bp, synthetic construct; identical to SEQ ID NO: 11564
  misc_feature 1..36: note = Synthetic oligonucleotide
  source 1..36: mol_type = other DNA

SEQ ID NO: 25793 - DNA, 36 bp, synthetic construct; identical to SEQ ID NO: 11565
  misc_feature 1..36: note = Synthetic oligonucleotide
  source 1..36: mol_type = other DNA

SEQ ID NO: 25794 - DNA, 36 bp, synthetic construct; identical to SEQ ID NO: 11565
  misc_feature 1..36: note = Synthetic oligonucleotide
  source 1..36: mol_type = other DNA

SEQ ID NO: 25795 - DNA, 36 bp, synthetic construct
  misc_feature 1..36: note = Synthetic oligonucleotide
  source 1..36: mol_type = other DNA
attttacccgatgctcttccggggggaaggcaaaac

SEQ ID NO: 25796 - DNA, 36 bp, synthetic construct; identical to SEQ ID NO: 11569
  misc_feature 1..36: note = Synthetic oligonucleotide
  source 1..36: mol_type = other DNA

SEQ ID NO: 25797 - DNA, 36 bp, synthetic construct; identical to SEQ ID NO: 11569
  misc_feature 1..36: note = Synthetic oligonucleotide
  source 1..36: mol_type = other DNA

SEQ ID NO: 25798 - DNA, 36 bp, synthetic construct; identical to SEQ ID NO: 11569
  misc_feature 1..36: note = Synthetic oligonucleotide
  source 1..36: mol_type = other DNA

SEQ ID NO: 25799 - DNA, 36 bp, synthetic construct
  misc_feature 1..36: note = Synthetic oligonucleotide
  source 1..36: mol_type = other DNA
attttactacctgggagatcgtgcggtaatcaagac

SEQ ID NO: 25800 - DNA, 36 bp, synthetic construct
  misc_feature 1..36: note = Synthetic oligonucleotide
  source 1..36: mol_type = other DNA
attttactaccttatagatttacactattctcaaac

SEQ ID NO: 25801 - DNA, 36 bp, synthetic construct
  misc_feature 1..36: note = Synthetic oligonucleotide
  source 1..36: mol_type = other DNA
attttactaccttatgaaattacactattctcaaac

SEQ ID NO: 25802 - DNA, 36 bp, synthetic construct
  misc_feature 1..36: note = Synthetic oligonucleotide
  source 1..36: mol_type = other DNA
attttagacggggggaatttgtagtcaagctggaac

SEQ ID NO: 25803 - DNA, 36 bp, synthetic construct
  misc_feature 1..36: note = Synthetic oligonucleotide
  source 1..36: mol_type = other DNA
attttagaggtttacagaattacactactctcaaac

SEQ ID NO: 25804 - DNA, 36 bp, synthetic construct; identical to SEQ ID NO: 25803
  misc_feature 1..36: note = Synthetic oligonucleotide
  source 1..36: mol_type = other DNA

SEQ ID NO: 25805 - DNA, 37 bp, synthetic construct
  misc_feature 1..37: note = Synthetic oligonucleotide
  source 1..37: mol_type = other DNA
attttagagttacttccactataacaaggattgaaac

SEQ ID NO: 25806 - DNA, 36 bp, synthetic construct; identical to SEQ ID NO: 11573
  misc_feature 1..36: note = Synthetic oligonucleotide
  source 1..36: mol_type = other DNA

SEQ ID NO: 25807 - DNA, 36 bp, synthetic construct; identical to SEQ ID NO: 11573
  misc_feature 1..36: note = Synthetic oligonucleotide
  source 1..36: mol_type = other DNA

SEQ ID NO: 25808 - DNA, 36 bp, synthetic construct; identical to SEQ ID NO: 11573
  misc_feature 1..36: note = Synthetic oligonucleotide
  source 1..36: mol_type = other DNA

SEQ ID NO: 25809 - DNA, 36 bp, synthetic construct; identical to SEQ ID NO: 11573
  misc_feature 1..36: note = Synthetic oligonucleotide
  source 1..36: mol_type = other DNA

SEQ ID NO: 25810 - DNA, 36 bp, synthetic construct; identical to SEQ ID NO: 11573
  misc_feature 1..36: note = Synthetic oligonucleotide
  source 1..36: mol_type = other DNA

SEQ ID NO: 25811 - DNA, 36 bp, synthetic construct; identical to SEQ ID NO: 11574
  misc_feature 1..36: note = Synthetic oligonucleotide
  source 1..36: mol_type = other DNA

SEQ ID NO: 25812 - DNA, 36 bp, synthetic construct
  misc_feature 1..36: note = Synthetic oligonucleotide
  source 1..36: mol_type = other DNA
attttagcaaattacgaattgagttctataagaaac

SEQ ID NO: 25813 - DNA, 36 bp, synthetic construct
  misc_feature 1..36: note = Synthetic oligonucleotide
  source 1..36: mol_type = other DNA
attttagcaggattaaatcagacaggcaagtaaaac

SEQ ID NO: 25814 - DNA, 36 bp, synthetic construct
  misc_feature 1..36: note = Synthetic oligonucleotide
  source 1..36: mol_type = other DNA
attttagccattcagaattcgaggtccagccgcaac

SEQ ID NO: 25815 - DNA, 36 bp, synthetic construct; identical to SEQ ID NO: 25814
  misc_feature 1..36: note = Synthetic oligonucleotide
  source 1..36: mol_type = other DNA

SEQ ID NO: 25816 - DNA, 36 bp, synthetic construct
  misc_feature 1..36: note = Synthetic oligonucleotide
  source 1..36: mol_type = other DNA
attttagccgctcagggatcgagggccaaccgcaac

SEQ ID NO: 25817 - DNA, 36 bp, synthetic construct
  misc_feature 1..36: note = Synthetic oligonucleotide
  source 1..36: mol_type = other DNA
attttaggagtatgttattttgaatggtaacaaaac

SEQ ID NO: 25818 - DNA, 36 bp, synthetic construct; identical to SEQ ID NO: 25817
  misc_feature 1..36: note = Synthetic oligonucleotide
  source 1..36: mol_type = other DNA

SEQ ID NO: 25819 - DNA, 36 bp, synthetic construct; identical to SEQ ID NO: 25817
  misc_feature 1..36: note = Synthetic oligonucleotide
  source 1..36: mol_type = other DNA

SEQ ID NO: 25820 - DNA, 36 bp, synthetic construct; identical to SEQ ID NO: 25817
  misc_feature 1..36: note = Synthetic oligonucleotide
  source 1..36: mol_type = other DNA

SEQ ID NO: 25821 - DNA, 36 bp, synthetic construct; identical to SEQ ID NO: 25817
  misc_feature 1..36: note = Synthetic oligonucleotide
  source 1..36: mol_type = other DNA

SEQ ID NO: 25822 - DNA, 36 bp, synthetic construct; identical to SEQ ID NO: 25817
  misc_feature 1..36: note = Synthetic oligonucleotide
  source 1..36: mol_type = other DNA

SEQ ID NO: 25823 - DNA, 36 bp, synthetic construct; identical to SEQ ID NO: 25817
  misc_feature 1..36: note = Synthetic oligonucleotide
  source 1..36: mol_type = other DNA

SEQ ID NO: 25824 - DNA, 36 bp, synthetic construct; identical to SEQ ID NO: 25817
  misc_feature 1..36: note = Synthetic oligonucleotide
  source 1..36: mol_type = other DNA

SEQ ID NO: 25825 - DNA, 36 bp, synthetic construct; identical to SEQ ID NO: 25817
  misc_feature 1..36: note = Synthetic oligonucleotide
  source 1..36: mol_type = other DNA

SEQ ID NO: 25826 - DNA, 36 bp, synthetic construct; identical to SEQ ID NO: 25817
  misc_feature 1..36: note = Synthetic oligonucleotide
  source 1..36: mol_type = other DNA

SEQ ID NO: 25827 - DNA, 36 bp, synthetic construct; identical to SEQ ID NO: 25817
  misc_feature 1..36: note = Synthetic oligonucleotide
  source 1..36: mol_type = other DNA

SEQ ID NO: 25828 - DNA, 37 bp, synthetic construct
  misc_feature 1..37: note = Synthetic oligonucleotide
  source 1..37: mol_type = other DNA
attttaggagtatgttattttgaatggtaacaaaacc

SEQ ID NO: 25829 - DNA, 37 bp, synthetic construct
  misc_feature 1..37: note = Synthetic oligonucleotide
  source 1..37: mol_type = other DNA
attttaggagtatgttattttgaatggtaacaaaact

SEQ ID NO: 25830 - DNA, 37 bp, synthetic construct; identical to SEQ ID NO: 25829
  misc_feature 1..37: note = Synthetic oligonucleotide
  source 1..37: mol_type = other DNA

SEQ ID NO: 25831 - DNA, 35 bp, synthetic construct
  misc_feature 1..35: note = Synthetic oligonucleotide
  source 1..35: mol_type = other DNA
attttagtaactgaataatttacgtgactgtaaaa

SEQ ID NO: 25832 - DNA, 36 bp, synthetic construct
  misc_feature 1..36: note = Synthetic oligonucleotide
  source 1..36: mol_type = other DNA
attttagtaactgaataatttacgtgactgtaaaac

SEQ ID NO: 25833 - DNA, 36 bp, synthetic construct; identical to SEQ ID NO: 25832
  misc_feature 1..36: note = Synthetic oligonucleotide
  source 1..36: mol_type = other DNA

SEQ ID NO: 25834 - DNA, 36 bp, synthetic construct; identical to SEQ ID NO: 25832
  misc_feature 1..36: note = Synthetic oligonucleotide
  source 1..36: mol_type = other DNA

SEQ ID NO: 25835 - DNA, 36 bp, synthetic construct; identical to SEQ ID NO: 25832
  misc_feature 1..36: note = Synthetic oligonucleotide
  source 1..36: mol_type = other DNA

SEQ ID NO: 25836 - DNA, 36 bp, synthetic construct; identical to SEQ ID NO: 25832
  misc_feature 1..36: note = Synthetic oligonucleotide
  source 1..36: mol_type = other DNA

SEQ ID NO: 25837 - DNA, 36 bp, synthetic construct; identical to SEQ ID NO: 25832
  misc_feature 1..36: note = Synthetic oligonucleotide
  source 1..36: mol_type = other DNA

SEQ ID NO: 25838 - DNA, 36 bp, synthetic construct; identical to SEQ ID NO: 25832
  misc_feature 1..36: note = Synthetic oligonucleotide
  source 1..36: mol_type = other DNA

SEQ ID NO: 25839 - DNA, 36 bp, synthetic construct; identical to SEQ ID NO: 25832
  misc_feature 1..36: note = Synthetic oligonucleotide
  source 1..36: mol_type = other DNA

SEQ ID NO: 25840 - DNA, 36 bp, synthetic construct; identical to SEQ ID NO: 25832
  misc_feature 1..36: note = Synthetic oligonucleotide
  source 1..36: mol_type = other DNA

SEQ ID NO: 25841 - DNA, 36 bp, synthetic construct; identical to SEQ ID NO: 25832
  misc_feature 1..36: note = Synthetic oligonucleotide
  source 1..36: mol_type = other DNA

SEQ ID NO: 25842 - DNA, 36 bp, synthetic construct; identical to SEQ ID NO: 25832
  misc_feature 1..36: note = Synthetic oligonucleotide
  source 1..36: mol_type = other DNA

SEQ ID NO: 25843 - DNA, 36 bp, synthetic construct; identical to SEQ ID NO: 11583
  misc_feature 1..36: note = Synthetic oligonucleotide
  source 1..36: mol_type = other DNA

SEQ ID NO: 25844 - DNA, 36 bp, synthetic construct; identical to SEQ ID NO: 11583
  misc_feature 1..36: note = Synthetic oligonucleotide
  source 1..36: mol_type = other DNA

SEQ ID NO: 25845 - DNA, 36 bp, synthetic construct; identical to SEQ ID NO: 11583
  misc_feature 1..36: note = Synthetic oligonucleotide
  source 1..36: mol_type = other DNA

SEQ ID NO: 25846 - DNA, 36 bp, synthetic construct; identical to SEQ ID NO: 11584
  misc_feature 1..36: note = Synthetic oligonucleotide
  source 1..36: mol_type = other DNA

SEQ ID NO: 25847 - DNA, 36 bp, synthetic construct; identical to SEQ ID NO: 11584
  misc_feature 1..36: note = Synthetic oligonucleotide
  source 1..36: mol_type = other DNA

SEQ ID NO: 25848 - DNA, 36 bp, synthetic construct; identical to SEQ ID NO: 11584
  misc_feature 1..36: note = Synthetic oligonucleotide
  source 1..36: mol_type = other DNA

SEQ ID NO: 25849 - DNA, 36 bp, synthetic construct; identical to SEQ ID NO: 11584
  misc_feature 1..36: note = Synthetic oligonucleotide
  source 1..36: mol_type = other DNA

SEQ ID NO: 25850 - DNA, 36 bp, synthetic construct; identical to SEQ ID NO: 11584
  misc_feature 1..36: note = Synthetic oligonucleotide
  source 1..36: mol_type = other DNA

SEQ ID NO: 25851 - DNA, 36 bp, synthetic construct; identical to SEQ ID NO: 11584
  misc_feature 1..36: note = Synthetic oligonucleotide
  source 1..36: mol_type = other DNA

SEQ ID NO: 25852 - DNA, 36 bp, synthetic construct; identical to SEQ ID NO: 11584
  misc_feature 1..36: note = Synthetic oligonucleotide
  source 1..36: mol_type = other DNA

SEQ ID NO: 25853 - DNA, 36 bp, synthetic construct; identical to SEQ ID NO: 11584
  misc_feature 1..36: note = Synthetic oligonucleotide
  source 1..36: mol_type = other DNA

SEQ ID NO: 25854 - DNA, 36 bp, synthetic construct; identical to SEQ ID NO: 11584
  misc_feature 1..36: note = Synthetic oligonucleotide
  source 1..36: mol_type = other DNA

SEQ ID NO: 25855 - DNA, 36 bp, synthetic construct; identical to SEQ ID NO: 11584
  misc_feature 1..36: note = Synthetic oligonucleotide
  source 1..36: mol_type = other DNA

SEQ ID NO: 25856 - DNA, 36 bp, synthetic construct; identical to SEQ ID NO: 11584
  misc_feature 1..36: note = Synthetic oligonucleotide
  source 1..36: mol_type = other DNA

SEQ ID NO: 25857 - DNA, 36 bp, synthetic construct; identical to SEQ ID NO: 11584
  misc_feature 1..36: note = Synthetic oligonucleotide
  source 1..36: mol_type = other DNA

SEQ ID NO: 25858 - DNA, 36 bp, synthetic construct; identical to SEQ ID NO: 11584
  misc_feature 1..36: note = Synthetic oligonucleotide
  source 1..36: mol_type = other DNA

SEQ ID NO: 25859 - DNA, 36 bp, synthetic construct; identical to SEQ ID NO: 11584
  misc_feature 1..36: note = Synthetic oligonucleotide
  source 1..36: mol_type = other DNA

SEQ ID NO: 25860 - DNA, 36 bp, synthetic construct; identical to SEQ ID NO: 11584
  misc_feature 1..36: note = Synthetic oligonucleotide
  source 1..36: mol_type = other DNA

SEQ ID NO: 25861 - DNA, 36 bp, synthetic construct; identical to SEQ ID NO: 11584
  misc_feature 1..36: note = Synthetic oligonucleotide
  source 1..36: mol_type = other DNA

SEQ ID NO: 25862 - DNA, 36 bp, synthetic construct; identical to SEQ ID NO: 11584
  misc_feature 1..36: note = Synthetic oligonucleotide
  source 1..36: mol_type = other DNA

SEQ ID NO: 25863 - DNA, 36 bp, synthetic construct; identical to SEQ ID NO: 11584
  misc_feature 1..36: note = Synthetic oligonucleotide
  source 1..36: mol_type = other DNA

SEQ ID NO: 25864 - DNA, 36 bp, synthetic construct; identical to SEQ ID NO: 11584
  misc_feature 1..36: note = Synthetic oligonucleotide
  source 1..36: mol_type = other DNA

SEQ ID NO: 25865 - DNA, 36 bp, synthetic construct; identical to SEQ ID NO: 11584
  misc_feature 1..36: note = Synthetic oligonucleotide
  source 1..36: mol_type = other DNA

SEQ ID NO: 25866 - DNA, 36 bp, synthetic construct; identical to SEQ ID NO: 11584
  misc_feature 1..36: note = Synthetic oligonucleotide
  source 1..36: mol_type = other DNA

SEQ ID NO: 25867 - DNA, 36 bp, synthetic construct; identical to SEQ ID NO: 11584
  misc_feature 1..36: note = Synthetic oligonucleotide
  source 1..36: mol_type = other DNA

SEQ ID NO: 25868 - DNA, 36 bp, synthetic construct; identical to SEQ ID NO: 11584
  misc_feature 1..36: note = Synthetic oligonucleotide
  source 1..36: mol_type = other DNA

SEQ ID NO: 25869 - DNA, 36 bp, synthetic construct; identical to SEQ ID NO: 11584
  misc_feature 1..36: note = Synthetic oligonucleotide
  source 1..36: mol_type = other DNA

SEQ ID NO: 25870 - DNA, 36 bp, synthetic construct; identical to SEQ ID NO: 11584
  misc_feature 1..36: note = Synthetic oligonucleotide
  source 1..36: mol_type = other DNA

SEQ ID NO: 25871 - DNA, 36 bp, synthetic construct; identical to SEQ ID NO: 11584
  misc_feature 1..36: note = Synthetic oligonucleotide
  source 1..36: mol_type = other DNA

SEQ ID NO: 25872 - DNA, 36 bp, synthetic construct
  misc_feature 1..36: note = Synthetic oligonucleotide
  source 1..36: mol_type = other DNA
attttagtacctaaacaaattatgtgactgtaaaac

SEQ ID NO: 25873 - DNA, 36 bp, synthetic construct; identical to SEQ ID NO: 25872
  misc_feature 1..36: note = Synthetic oligonucleotide
  source 1..36: mol_type = other DNA

SEQ ID NO: 25874 - DNA, 36 bp, synthetic construct; identical to SEQ ID NO: 11585
  misc_feature 1..36: note = Synthetic oligonucleotide
  source 1..36: mol_type = other DNA

SEQ ID NO: 25875 - DNA, 36 bp, synthetic construct; identical to SEQ ID NO: 11586
  misc_feature 1..36: note = Synthetic oligonucleotide
  source 1..36: mol_type = other DNA

SEQ ID NO: 25876 - DNA, 31 bp, synthetic construct
  misc_feature 1..31: note = Synthetic oligonucleotide
  source 1..31: mol_type = other DNA
attttagtatctttgaaccattggaaacagc

SEQ ID NO: 25877 - DNA, 36 bp, synthetic construct
  misc_feature 1..36: note = Synthetic oligonucleotide
  source 1..36: mol_type = other DNA
attttagttcccttttattctttggtatggtataat

SEQ ID NO: 25878 - DNA, 36 bp, synthetic construct
  misc_feature 1..36: note = Synthetic oligonucleotide
  source 1..36: mol_type = other DNA
attttagttcctggataattcaagttagtgtaaaac

SEQ ID NO: 25879 - DNA, 36 bp, synthetic construct
  misc_feature 1..36: note = Synthetic oligonucleotide
  source 1..36: mol_type = other DNA
attttatagttacttaaatcttgagaatacaaaaac

SEQ ID NO: 25880 - DNA, 36 bp, synthetic construct; identical to SEQ ID NO: 11590
  misc_feature 1..36: note = Synthetic oligonucleotide
  source 1..36: mol_type = other DNA

SEQ ID NO: 25881 - DNA, 36 bp, synthetic construct; identical to SEQ ID NO: 11590
  misc_feature 1..36: note = Synthetic oligonucleotide
  source 1..36: mol_type = other DNA

SEQ ID NO: 25882 - DNA, 36 bp, synthetic construct; identical to SEQ ID NO: 11591
  misc_feature 1..36: note = Synthetic oligonucleotide
  source 1..36: mol_type = other DNA

SEQ ID NO: 25883 - DNA, 36 bp, synthetic construct
  misc_feature 1..36: note = Synthetic oligonucleotide
  source 1..36: mol_type = other DNA
attttatcacccgcgcctccggggggaagccaaaac

SEQ ID NO: 25884 - DNA, 36 bp, synthetic construct
  misc_feature 1..36: note = Synthetic oligonucleotide
  source 1..36: mol_type = other DNA
attttatcaggcattccgatggtggggtgtcggaac

SEQ ID NO: 25885 - DNA, 36 bp, synthetic construct
  misc_feature 1..36: note = Synthetic oligonucleotide
  source 1..36: mol_type = other DNA
attttatctgactaggaaatgcgcaccggctggaac

SEQ ID NO: 25886 - DNA, 36 bp, synthetic construct
  misc_feature 1..36: note = Synthetic oligonucleotide
  source 1..36: mol_type = other DNA
attttatcttacttaaattttacaaggtactaaaac

SEQ ID NO: 25887 - DNA, 36 bp, synthetic construct; identical to SEQ ID NO: 25886
  misc_feature 1..36: note = Synthetic oligonucleotide
  source 1..36: mol_type = other DNA

SEQ ID NO: 25888 - DNA, 36 bp, synthetic construct
  misc_feature 1..36: note = Synthetic oligonucleotide
  source 1..36: mol_type = other DNA
attttgaaaaagaacattttgttgtaaagtcaaaac

SEQ ID NO: 25889 - DNA, 36 bp, synthetic construct
  misc_feature 1..36: note = Synthetic oligonucleotide
  source 1..36: mol_type = other DNA
attttgaaagaactcatttcttagtgacgtcaaaac

SEQ ID NO: 25890 - DNA, 36 bp, synthetic construct; identical to SEQ ID NO: 11597
  misc_feature 1..36: note = Synthetic oligonucleotide
  source 1..36: mol_type = other DNA

SEQ ID NO: 25891 - DNA, 29 bp, synthetic construct
  misc_feature 1..29: note = Synthetic oligonucleotide
  source 1..29: mol_type = other DNA
attttgccctatgggattttggaatcaag

SEQ ID NO: 25892 - DNA, 36 bp, synthetic construct; identical to SEQ ID NO: 11600
  misc_feature 1..36: note = Synthetic oligonucleotide
  source 1..36: mol_type = other DNA

SEQ ID NO: 25893 - DNA, 24 bp, synthetic construct
  misc_feature 1..24: note = Synthetic oligonucleotide
  source 1..24: mol_type = other DNA
attttgcgccccccgtatttggaa

SEQ ID NO: 25894 - DNA, 36 bp, synthetic construct
  misc_feature 1..36: note = Synthetic oligonucleotide
  source 1..36: mol_type = other DNA
attttgctctgatagattttggaatcaaggcaaaac

SEQ ID NO: 25895 - DNA, 36 bp, synthetic construct; identical to SEQ ID NO: 11603
  misc_feature 1..36: note = Synthetic oligonucleotide
  source 1..36: mol_type = other DNA

SEQ ID NO: 25896 - DNA, 36 bp, synthetic construct
  misc_feature 1..36: note = Synthetic oligonucleotide
  source 1..36: mol_type = other DNA
attttgtaatcattcaaaataacacacttctaaaac

SEQ ID NO: 25897 - DNA, 36 bp, synthetic construct
  misc_feature 1..36: note = Synthetic oligonucleotide
  source 1..36: mol_type = other DNA
attttgtagaattcgaaatttacatatctctcaaac

SEQ ID NO: 25898 - DNA, 30 bp, synthetic construct
  misc_feature 1..30: note = Synthetic oligonucleotide
  source 1..30: mol_type = other DNA
attttgtatctttgacagattgaatacaac

SEQ ID NO: 25899 - DNA, 30 bp, synthetic construct; identical to SEQ ID NO: 25898
  misc_feature 1..30: note = Synthetic oligonucleotide
  source 1..30: mol_type = other DNA

SEQ ID NO: 25900 - DNA, 36 bp, synthetic construct; identical to SEQ ID NO: 11605
  misc_feature 1..36: note = Synthetic oligonucleotide
  source 1..36: mol_type = other DNA

SEQ ID NO: 25901 - DNA, 36 bp, synthetic construct; identical to SEQ ID NO: 11605
  misc_feature 1..36: note = Synthetic oligonucleotide
  source 1..36: mol_type = other DNA

SEQ ID NO: 25902 - DNA, 36 bp, synthetic construct; identical to SEQ ID NO: 11605
  misc_feature 1..36: note = Synthetic oligonucleotide
  source 1..36: mol_type = other DNA

SEQ ID NO: 25903 - DNA, 36 bp, synthetic construct; identical to SEQ ID NO: 11605
  misc_feature 1..36: note = Synthetic oligonucleotide
  source 1..36: mol_type = other DNA

SEQ ID NO: 25904 - DNA, 36 bp, synthetic construct
  misc_feature 1..36: note = Synthetic oligonucleotide
  source 1..36: mol_type = other DNA
atttttagaaagaacattttgttgtaaagtcaaaac

SEQ ID NO: 25905 - DNA, 32 bp, synthetic construct
  misc_feature 1..32: note = Synthetic oligonucleotide
  source 1..32: mol_type = other DNA
caaaactacaaaatttgaaagcaattcacaac

SEQ ID NO: 25906 - DNA, 32 bp, synthetic construct; identical to SEQ ID NO: 25905
  misc_feature 1..32: note = Synthetic oligonucleotide
  source 1..32: mol_type = other DNA

SEQ ID NO: 25907 - DNA, 32 bp, synthetic construct; identical to SEQ ID NO: 25905
  misc_feature 1..32: note = Synthetic oligonucleotide
  source 1..32: mol_type = other DNA

SEQ ID NO: 25908 - DNA, 32 bp, synthetic construct; identical to SEQ ID NO: 25905
  misc_feature 1..32: note = Synthetic oligonucleotide
  source 1..32: mol_type = other DNA

SEQ ID NO: 25909 - DNA, 32 bp, synthetic construct; identical to SEQ ID NO: 25905
  misc_feature 1..32: note = Synthetic oligonucleotide
  source 1..32: mol_type = other DNA

SEQ ID NO: 25910 - DNA, 32 bp, synthetic construct; identical to SEQ ID NO: 25905
  misc_feature 1..32: note = Synthetic oligonucleotide
  source 1..32: mol_type = other DNA

SEQ ID NO: 25911 - DNA, 32 bp, synthetic construct; identical to SEQ ID NO: 25905
  misc_feature 1..32: note = Synthetic oligonucleotide
  source 1..32: mol_type = other DNA

SEQ ID NO: 25912 - DNA, 32 bp, synthetic construct; identical to SEQ ID NO: 25905
  misc_feature 1..32: note = Synthetic oligonucleotide
  source 1..32: mol_type = other DNA

SEQ ID NO: 25913 - DNA, 32 bp, synthetic construct; identical to SEQ ID NO: 25905
  misc_feature 1..32: note = Synthetic oligonucleotide
  source 1..32: mol_type = other DNA

SEQ ID NO: 25914 - DNA, 32 bp, synthetic construct; identical to SEQ ID NO: 25905
  misc_feature 1..32: note = Synthetic oligonucleotide
  source 1..32: mol_type = other DNA

SEQ ID NO: 25915 - DNA, 32 bp, synthetic construct; identical to SEQ ID NO: 25905
  misc_feature 1..32: note = Synthetic oligonucleotide
  source 1..32: mol_type = other DNA

SEQ ID NO: 25916 - DNA, 32 bp, synthetic construct; identical to SEQ ID NO: 25905
  misc_feature 1..32: note = Synthetic oligonucleotide
  source 1..32: mol_type = other DNA

SEQ ID NO: 25917 - DNA, 32 bp, synthetic construct; identical to SEQ ID NO: 25905
  misc_feature 1..32: note = Synthetic oligonucleotide
  source 1..32: mol_type = other DNA

SEQ ID NO: 25918 - DNA, 32 bp, synthetic construct; identical to SEQ ID NO: 25905
  misc_feature 1..32: note = Synthetic oligonucleotide
  source 1..32: mol_type = other DNA

SEQ ID NO: 25919 - DNA, 32 bp, synthetic construct; identical to SEQ ID NO: 25905
  misc_feature 1..32: note = Synthetic oligonucleotide
  source 1..32: mol_type = other DNA

SEQ ID NO: 25920 - DNA, 32 bp, synthetic construct; identical to SEQ ID NO: 25905
  misc_feature 1..32: note = Synthetic oligonucleotide
  source 1..32: mol_type = other DNA

SEQ ID NO: 25921 - DNA, 32 bp, synthetic construct; identical to SEQ ID NO: 25905
  misc_feature 1..32: note = Synthetic oligonucleotide
  source 1..32: mol_type = other DNA

SEQ ID NO: 25922 - DNA, 33 bp, synthetic construct
  misc_feature 1..33: note = Synthetic oligonucleotide
  source 1..33: mol_type = other DNA
caaaactacaaaatttgaaagcaattcacaact

SEQ ID NO: 25923 - DNA, 32 bp, synthetic construct
  misc_feature 1..32: note = Synthetic oligonucleotide
  source 1..32: mol_type = other DNA
caaaactacaaaatttgaaagcaatttacaac

SEQ ID NO: 25924 - DNA, 32 bp, synthetic construct
  misc_feature 1..32: note = Synthetic oligonucleotide
  source 1..32: mol_type = other DNA
caaaactacgaaatttgaaagcaattcacaac

SEQ ID NO: 25925 - DNA, 32 bp, synthetic construct; identical to SEQ ID NO: 25924
  misc_feature 1..32: note = Synthetic oligonucleotide
  source 1..32: mol_type = other DNA

SEQ ID NO: 25926 - DNA, 32 bp, synthetic construct; identical to SEQ ID NO: 25924
  misc_feature 1..32: note = Synthetic oligonucleotide
  source 1..32: mol_type = other DNA

SEQ ID NO: 25927 - DNA, 23 bp, synthetic construct
  misc_feature 1..23: note = Synthetic oligonucleotide
  source 1..23: mol_type = other DNA
caaaatttacatatctctcaaac

SEQ ID NO: 25928 - DNA, 32 bp, synthetic construct
  misc_feature 1..32: note = Synthetic oligonucleotide
  source 1..32: mol_type = other DNA
caaacttgtatctttgacttgattcatacagc

SEQ ID NO: 25929 - DNA, 31 bp, synthetic construct
  misc_feature 1..31: note = Synthetic oligonucleotide
  source 1..31: mol_type = other DNA
caaagatacaattttctaagcaaatcacaac

SEQ ID NO: 25930 - DNA, 31 bp, synthetic construct
  misc_feature 1..31: note = Synthetic oligonucleotide
  source 1..31: mol_type = other DNA
caaagatactaaaatgagagcaaatcacaac

SEQ ID NO: 25931 - DNA, 31 bp, synthetic construct; identical to SEQ ID NO: 25930
  misc_feature 1..31: note = Synthetic oligonucleotide
  source 1..31: mol_type = other DNA

SEQ ID NO: 25932 - DNA, 31 bp, synthetic construct; identical to SEQ ID NO: 25930
  misc_feature 1..31: note = Synthetic oligonucleotide
  source 1..31: mol_type = other DNA

SEQ ID NO: 25933 - DNA, 31 bp, synthetic construct; identical to SEQ ID NO: 25930
  misc_feature 1..31: note = Synthetic oligonucleotide
  source 1..31: mol_type = other DNA

SEQ ID NO: 25934 - DNA, 31 bp, synthetic construct
  misc_feature 1..31: note = Synthetic oligonucleotide
  source 1..31: mol_type = other DNA
caaagatactaatttgaaagcaaatcacaac

SEQ ID NO: 25935 - DNA, 28 bp, synthetic construct
  misc_feature 1..28: note = Synthetic oligonucleotide
  source 1..28: mol_type = other DNA
caacctggaaacaaccagggtctataac

SEQ ID NO: 25936 - DNA, 36 bp, synthetic construct
  misc_feature 1..36: note = Synthetic oligonucleotide
  source 1..36: mol_type = other DNA
caacttaaagcctatagatttacactactctcaaac

SEQ ID NO: 25937 - DNA, 36 bp, synthetic construct
  misc_feature 1..36: note = Synthetic oligonucleotide
  source 1..36: mol_type = other DNA
caagcatatcagggattgtcagagttgaaccccagc

SEQ ID NO: 25938 - DNA, 22 bp, synthetic construct
  misc_feature 1..22: note = Synthetic oligonucleotide
  source 1..22: mol_type = other DNA
caagcttatcaagaagggtgaa

SEQ ID NO: 25939 - DNA, 36 bp, synthetic construct; identical to SEQ ID NO: 11608
  misc_feature 1..36: note = Synthetic oligonucleotide
  source 1..36: mol_type = other DNA

SEQ ID NO: 25940 - DNA, 36 bp, synthetic construct; identical to SEQ ID NO: 11608
  misc_feature 1..36: note = Synthetic oligonucleotide
  source 1..36: mol_type = other DNA

SEQ ID NO: 25941 - DNA, 36 bp, synthetic construct; identical to SEQ ID NO: 11608
  misc_feature 1..36: note = Synthetic oligonucleotide
  source 1..36: mol_type = other DNA

SEQ ID NO: 25942 - DNA, 36 bp, synthetic construct; identical to SEQ ID NO: 11608
  misc_feature 1..36: note = Synthetic oligonucleotide
  source 1..36: mol_type = other DNA

SEQ ID NO: 25943 - DNA, 36 bp, synthetic construct; identical to SEQ ID NO: 11608
  misc_feature 1..36: note = Synthetic oligonucleotide
  source 1..36: mol_type = other DNA

SEQ ID NO: 25944 - DNA, 36 bp, synthetic construct; identical to SEQ ID NO: 11608
  misc_feature 1..36: note = Synthetic oligonucleotide
  source 1..36: mol_type = other DNA

SEQ ID NO: 25945 - DNA, 36 bp, synthetic construct; identical to SEQ ID NO: 11608
  misc_feature 1..36: note = Synthetic oligonucleotide
  source 1..36: mol_type = other DNA

SEQ ID NO: 25946 - DNA, 36 bp, synthetic construct; identical to SEQ ID NO: 11608
  misc_feature 1..36: note = Synthetic oligonucleotide
  source 1..36: mol_type = other DNA

SEQ ID NO: 25947 - DNA, 36 bp, synthetic construct
  misc_feature 1..36: note = Synthetic oligonucleotide
  source 1..36: mol_type = other DNA
caagtatatcaaggggataggtgactgaatcccaac

SEQ ID NO: 25948 - DNA, 31 bp, synthetic construct
  misc_feature 1..31: note = Synthetic oligonucleotide
  source 1..31: mol_type = other DNA
caagtatatcagggagtgtaagagttgaacc

SEQ ID NO: 25949 - DNA, 31 bp, synthetic construct; identical to SEQ ID NO: 25948
  misc_feature 1..31: note = Synthetic oligonucleotide
  source 1..31: mol_type = other DNA

SEQ ID NO: 25950 - DNA, 36 bp, synthetic construct
  misc_feature 1..36: note = Synthetic oligonucleotide
  source 1..36: mol_type = other DNA
caagtatatcagggagtgtaagagttgaaccccagc

SEQ ID NO: 25951 - DNA, 36 bp, synthetic construct; identical to SEQ ID NO: 25950
  misc_feature 1..36: note = Synthetic oligonucleotide
  source 1..36: mol_type = other DNA

SEQ ID NO: 25952 - DNA, 36 bp, synthetic construct; identical to SEQ ID NO: 25950
  misc_feature 1..36: note = Synthetic oligonucleotide
  source 1..36: mol_type = other DNA

SEQ ID NO: 25953 - DNA, 36 bp, synthetic construct; identical to SEQ ID NO: 25950
  misc_feature 1..36: note = Synthetic oligonucleotide
  source 1..36: mol_type = other DNA

SEQ ID NO: 25954 - DNA, 36 bp, synthetic construct
  misc_feature 1..36: note = Synthetic oligonucleotide
  source 1..36: mol_type = other DNA
caagtatatcagggagtgtaagagttgaacctcagc

SEQ ID NO: 25955 - DNA, 36 bp, synthetic construct
  misc_feature 1..36: note = Synthetic oligonucleotide
  source 1..36: mol_type = other DNA
caagtatatcagggatattgagaactgatccccagc

SEQ ID NO: 25956 - DNA, 36 bp, synthetic construct
  misc_feature 1..36: note = Synthetic oligonucleotide
  source 1..36: mol_type = other DNA
caagtatatcaggggatttacgagttgaaccccagc

SEQ ID NO: 25957 - DNA, 36 bp, synthetic construct; identical to SEQ ID NO: 25956
  misc_feature 1..36: note = Synthetic oligonucleotide
  source 1..36: mol_type = other DNA

SEQ ID NO: 25958 - DNA, 36 bp, synthetic construct
  misc_feature 1..36: note = Synthetic oligonucleotide
  source 1..36: mol_type = other DNA
caagtgtatcaaggggataggtgactgaatcccaac

SEQ ID NO: 25959 - DNA, 36 bp, synthetic construct; identical to SEQ ID NO: 11615
  misc_feature 1..36: note = Synthetic oligonucleotide
  source 1..36: mol_type = other DNA

SEQ ID NO: 25960 - DNA, 36 bp, synthetic construct; identical to SEQ ID NO: 11615
  misc_feature 1..36: note = Synthetic oligonucleotide
  source 1..36: mol_type = other DNA

SEQ ID NO: 25961 - DNA, 37 bp, synthetic construct
  misc_feature 1..37: note = Synthetic oligonucleotide
  source 1..37: mol_type = other DNA
caagtttatcaagaagggtagaagctaattcccagta

SEQ ID NO: 25962 - DNA, 37 bp, synthetic construct
  misc_feature 1..37: note = Synthetic oligonucleotide
  source 1..37: mol_type = other DNA
caagtttatcaagaagggtagaagctaattcccagtg

SEQ ID NO: 25963 - DNA, 27 bp, synthetic construct
  misc_feature 1..27: note = Synthetic oligonucleotide
  source 1..27: mol_type = other DNA
caatgtttcaaagatactaaaatgaga

SEQ ID NO: 25964 - DNA, 36 bp, synthetic construct
  misc_feature 1..36: note = Synthetic oligonucleotide
  source 1..36: mol_type = other DNA
caattatatcaagaatggtagaagctaattttcaac

SEQ ID NO: 25965 - DNA, 26 bp, synthetic construct
  misc_feature 1..26: note = Synthetic oligonucleotide
  source 1..26: mol_type = other DNA
cacaaaatttgaaagcaattcacaac

SEQ ID NO: 25966 - DNA, 22 bp, synthetic construct
  misc_feature 1..22: note = Synthetic oligonucleotide
  source 1..22: mol_type = other DNA
cacactccccctgatatactcc

SEQ ID NO: 25967 - DNA, 24 bp, synthetic construct
  misc_feature 1..24: note = Synthetic oligonucleotide
  source 1..24: mol_type = other DNA
cacccacaatttgtttcaaagcca

SEQ ID NO: 25968 - DNA, 37 bp, synthetic construct
  misc_feature 1..37: note = Synthetic oligonucleotide
  source 1..37: mol_type = other DNA
cacctacaaaggtaagaaattttaagcaaatcacaac

SEQ ID NO: 25969 - DNA, 30 bp, synthetic construct; identical to SEQ ID NO: 11618
  misc_feature 1..30: note = Synthetic oligonucleotide
  source 1..30: mol_type = other DNA

SEQ ID NO: 25970 - DNA, 37 bp, synthetic construct
  misc_feature 1..37: note = Synthetic oligonucleotide
  source 1..37: mol_type = other DNA
cactttgctttactgagaagtggaatcaaggcaaagc

SEQ ID NO: 25971 - DNA, 38 bp, synthetic construct
  misc_feature 1..38: note = Synthetic oligonucleotide
  source 1..38: mol_type = other DNA
cagctgtggcttgcggggaatcgtcgctcggatacact

SEQ ID NO: 25972 - DNA, 36 bp, synthetic construct; identical to SEQ ID NO: 11622
  misc_feature 1..36: note = Synthetic oligonucleotide
  source 1..36: mol_type = other DNA

SEQ ID NO: 25973 - DNA, 36 bp, synthetic construct; identical to SEQ ID NO: 11624
  misc_feature 1..36: note = Synthetic oligonucleotide
  source 1..36: mol_type = other DNA

SEQ ID NO: 25974 - DNA, 36 bp, synthetic construct; identical to SEQ ID NO: 11625
  misc_feature 1..36: note = Synthetic oligonucleotide
  source 1..36: mol_type = other DNA

SEQ ID NO: 25975 - DNA, 36 bp, synthetic construct; identical to SEQ ID NO: 11625
  misc_feature 1..36: note = Synthetic oligonucleotide
  source 1..36: mol_type = other DNA

SEQ ID NO: 25976 - DNA, 36 bp, synthetic construct; identical to SEQ ID NO: 11625
  misc_feature 1..36: note = Synthetic oligonucleotide
  source 1..36: mol_type = other DNA

SEQ ID NO: 25977 - DNA, 36 bp, synthetic construct; identical to SEQ ID NO: 11625
  misc_feature 1..36: note = Synthetic oligonucleotide
  source 1..36: mol_type = other DNA

SEQ ID NO: 25978 - DNA, 36 bp, synthetic construct; identical to SEQ ID NO: 11625
  misc_feature 1..36: note = Synthetic oligonucleotide
  source 1..36: mol_type = other DNA

SEQ ID NO: 25979 - DNA, 36 bp, synthetic construct; identical to SEQ ID NO: 11625
  misc_feature 1..36: note = Synthetic oligonucleotide
  source 1..36: mol_type = other DNA

SEQ ID NO: 25980 - DNA, 36 bp, synthetic construct; identical to SEQ ID NO: 11625
  misc_feature 1..36: note = Synthetic oligonucleotide
  source 1..36: mol_type = other DNA

SEQ ID NO: 25981 - DNA, 36 bp, synthetic construct; identical to SEQ ID NO: 11625
  misc_feature 1..36: note = Synthetic oligonucleotide
  source 1..36: mol_type = other DNA

SEQ ID NO: 25982 - DNA, 36 bp, synthetic construct; identical to SEQ ID NO: 11625
  misc_feature 1..36: note = Synthetic oligonucleotide
  source 1..36: mol_type = other DNA

SEQ ID NO: 25983 - DNA, 36 bp, synthetic construct; identical to SEQ ID NO: 11625
  misc_feature 1..36: note = Synthetic oligonucleotide
  source 1..36: mol_type = other DNA

SEQ ID NO: 25984 - DNA, 36 bp, synthetic construct; identical to SEQ ID NO: 11625
  misc_feature 1..36: note = Synthetic oligonucleotide
  source 1..36: mol_type = other DNA

SEQ ID NO: 25985 - DNA, 36 bp, synthetic construct; identical to SEQ ID NO: 11625
  misc_feature 1..36: note = Synthetic oligonucleotide
  source 1..36: mol_type = other DNA

SEQ ID NO: 25986 - DNA, 38 bp, synthetic construct
  misc_feature 1..38: note = Synthetic oligonucleotide
  source 1..38: mol_type = other DNA
cagtctagccgattgggatttttgcacgggccggaact

SEQ ID NO: 25987 - DNA, 37 bp, synthetic construct
  misc_feature 1..37: note = Synthetic oligonucleotide
  source 1..37: mol_type = other DNA
cagtgtatcaaagaggccgtttccgatcagccagagc

SEQ ID NO: 25988 - DNA, 36 bp, synthetic construct; identical to SEQ ID NO: 11626
  misc_feature 1..36: note = Synthetic oligonucleotide
  source 1..36: mol_type = other DNA

SEQ ID NO: 25989 - DNA, 36 bp, synthetic construct; identical to SEQ ID NO: 11626
  misc_feature 1..36: note = Synthetic oligonucleotide
  source 1..36: mol_type = other DNA

SEQ ID NO: 25990 - DNA, 36 bp, synthetic construct; identical to SEQ ID NO: 11626
  misc_feature 1..36: note = Synthetic oligonucleotide
  source 1..36: mol_type = other DNA

SEQ ID NO: 25991 - DNA, 38 bp, synthetic construct
  misc_feature 1..38: note = Synthetic oligonucleotide
  source 1..38: mol_type = other DNA
cagtttgagtaccatacatttttacatcattctcaaac

SEQ ID NO: 25992 - DNA, 38 bp, synthetic construct
  misc_feature 1..38: note = Synthetic oligonucleotide
  source 1..38: mol_type = other DNA
cagttttggtaccctctaaatttttgctatactgaaac

SEQ ID NO: 25993 - DNA, 36 bp, synthetic construct
  misc_feature 1..36: note = Synthetic oligonucleotide
  source 1..36: mol_type = other DNA
cataaatattacctaaaaattacagggtaccataat

SEQ ID NO: 25994 - DNA, 36 bp, synthetic construct
  misc_feature 1..36: note = Synthetic oligonucleotide
  source 1..36: mol_type = other DNA
cataccacatcgccccggtgagggcatgatcaaaac

SEQ ID NO: 25995 - DNA, 26 bp, synthetic construct
  misc_feature 1..26: note = Synthetic oligonucleotide
  source 1..26: mol_type = other DNA
catacgtttttacatcattctcaaac

SEQ ID NO: 25996 - DNA, 36 bp, synthetic construct
  misc_feature 1..36: note = Synthetic oligonucleotide
  source 1..36: mol_type = other DNA
catgttaaagacctctttttgaaagcaattcccaac

SEQ ID NO: 25997 - DNA, 36 bp, synthetic construct; identical to SEQ ID NO: 25996
  misc_feature 1..36: note = Synthetic oligonucleotide
  source 1..36: mol_type = other DNA

SEQ ID NO: 25998 - DNA, 36 bp, synthetic construct; identical to SEQ ID NO: 25996
  misc_feature 1..36: note = Synthetic oligonucleotide
  source 1..36: mol_type = other DNA

SEQ ID NO: 25999 - DNA, 37 bp, synthetic construct
  misc_feature 1..37: note = Synthetic oligonucleotide
  source 1..37: mol_type = other DNA
cattataccataccaagagctattagggaactatgac

SEQ ID NO: 26000 - DNA, 26 bp, synthetic construct
  misc_feature 1..26: note = Synthetic oligonucleotide
  source 1..26: mol_type = other DNA
cattcgaaacaacacagctctaaaac

SEQ ID NO: 26001 - DNA, 27 bp, synthetic construct
  misc_feature 1..27: note = Synthetic oligonucleotide
  source 1..27: mol_type = other DNA
cattcttgaattacaaggttctcaaac

SEQ ID NO: 26002 - DNA, 28 bp, synthetic construct
  misc_feature 1..28: note = Synthetic oligonucleotide
  source 1..28: mol_type = other DNA
catttacagaatcacactactctcaaac

SEQ ID NO: 26003 - DNA, 36 bp, synthetic construct
  misc_feature 1..36: note = Synthetic oligonucleotide
  source 1..36: mol_type = other DNA
catttcaaagatcgtttactgaaagcaaatcacaac

SEQ ID NO: 26004 - DNA, 36 bp, synthetic construct
  misc_feature 1..36: note = Synthetic oligonucleotide
  source 1..36: mol_type = other DNA
catttgcaatcatttgattttacatagttccaaaac

SEQ ID NO: 26005 - DNA, 20 bp, synthetic construct
  misc_feature 1..20: note = Synthetic oligonucleotide
  source 1..20: mol_type = other DNA
catttggaatcatttgcttt

SEQ ID NO: 26006 - DNA, 20 bp, synthetic construct
  misc_feature 1..20: note = Synthetic oligonucleotide
  source 1..20: mol_type = other DNA
catttggaatcatttgcttt

SEQ ID NO: 26007 - DNA, 20 bp, synthetic construct
  misc_feature 1..20: note = Synthetic oligonucleotide
  source 1..20: mol_type = other DNA
catttggaatcatttgcttt

SEQ ID NO: 26008 - DNA, 36 bp, synthetic construct
  misc_feature 1..36: note = Synthetic oligonucleotide
  source 1..36: mol_type = other DNA
catttggaatcatttgcttttacatggttccaaaac

SEQ ID NO: 26009 - DNA, 37 bp, synthetic construct
  misc_feature 1..37: note = Synthetic oligonucleotide
  source 1..37: mol_type = other DNA
catttggaatcatttgcttttacatggttccaaaaca

SEQ ID NO: 26010 - DNA, 36 bp, synthetic construct
  misc_feature 1..36: note = Synthetic oligonucleotide
  source 1..36: mol_type = other DNA
catttgttactctacaaaattacactactctcaaac

SEQ ID NO: 26011 - DNA, 37 bp, synthetic construct
  misc_feature 1..37: note = Synthetic oligonucleotide
  source 1..37: mol_type = other DNA
cattttaggagtatgttattttgaatggtaacaaaac

SEQ ID NO: 26012 - DNA, 36 bp, synthetic construct
  misc_feature 1..36: note = Synthetic oligonucleotide
  source 1..36: mol_type = other DNA
ccaatatcttatccaatttttaaatcaaaccacaac

SEQ ID NO: 26013 - DNA, 37 bp, synthetic construct
  misc_feature 1..37: note = Synthetic oligonucleotide
  source 1..37: mol_type = other DNA
ccaatgcaaagatactaattttaaagctaatcacaac

SEQ ID NO: 26014 - DNA, 29 bp, synthetic construct
  misc_feature 1..29: note = Synthetic oligonucleotide
  source 1..29: mol_type = other DNA
ccaatggttcaaagatactaatttgaaag

SEQ ID NO: 26015 - DNA, 24 bp, synthetic construct
  misc_feature 1..24: note = Synthetic oligonucleotide
  source 1..24: mol_type = other DNA
cccccccggctttgtaatcaaggc

SEQ ID NO: 26016 - DNA, 29 bp, synthetic construct
  misc_feature 1..29: note = Synthetic oligonucleotide
  source 1..29: mol_type = other DNA
cccccccggctttgtaatcaaggcaaagc

SEQ ID NO: 26017 - DNA, 28 bp, synthetic construct
  misc_feature 1..28: note = Synthetic oligonucleotide
  source 1..28: mol_type = other DNA
ccccccgtggttggaaccaaggcaaagc

SEQ ID NO: 26018 - DNA, 37 bp, synthetic construct; identical to SEQ ID NO: 11638
  misc_feature 1..37: note = Synthetic oligonucleotide
  source 1..37: mol_type = other DNA

SEQ ID NO: 26019 - DNA, 27 bp, synthetic construct
  misc_feature 1..27: note = Synthetic oligonucleotide
  source 1..27: mol_type = other DNA
ccctacgaatttacactgctctcaaac

SEQ ID NO: 26020 - DNA, 25 bp, synthetic construct
  misc_feature 1..25: note = Synthetic oligonucleotide
  source 1..25: mol_type = other DNA
ccgatatccgacagaggactaaaac

SEQ ID NO: 26021 - DNA, 25 bp, synthetic construct
  misc_feature 1..25: note = Synthetic oligonucleotide
  source 1..25: mol_type = other DNA
ccgggaaccgccgtttttgtacact

SEQ ID NO: 26022 - DNA, 25 bp, synthetic construct
  misc_feature 1..25: note = Synthetic oligonucleotide
  source 1..25: mol_type = other DNA
ccgggaaccgctcctgagatacact

SEQ ID NO: 26023 - DNA, 25 bp, synthetic construct
  misc_feature 1..25: note = Synthetic oligonucleotide
  source 1..25: mol_type = other DNA
ccgggaaccgctcctgagatacact

SEQ ID NO: 26024 - DNA, 36 bp, synthetic construct
  misc_feature 1..36: note = Synthetic oligonucleotide
  source 1..36: mol_type = other DNA
ccgtgatatctttatattcctacatcaaaccacaac

SEQ ID NO: 26025 - DNA, 35 bp, synthetic construct; identical to SEQ ID NO: 11643
  misc_feature 1..35: note = Synthetic oligonucleotide
  source 1..35: mol_type = other DNA

SEQ ID NO: 26026 - DNA, 36 bp, synthetic construct
  misc_feature 1..36: note = Synthetic oligonucleotide
  source 1..36: mol_type = other DNA
cctatcaaacttacgaaattatagccaatctacaac

SEQ ID NO: 26027 - DNA, 31 bp, synthetic construct
  misc_feature 1..31: note = Synthetic oligonucleotide
  source 1..31: mol_type = other DNA
cctgcgaattatctgtaaatttaaagaactg

SEQ ID NO: 26028 - DNA, 36 bp, synthetic construct
  misc_feature 1..36: note = Synthetic oligonucleotide
  source 1..36: mol_type = other DNA
cctgcggattgactgcaggcagtgatcaattaccat

SEQ ID NO: 26029 - DNA, 29 bp, synthetic construct
  misc_feature 1..29: note = Synthetic oligonucleotide
  source 1..29: mol_type = other DNA
cctgcggtgagccgacgctcagatacact

SEQ ID NO: 26030 - DNA, 28 bp, synthetic construct
  misc_feature 1..28: note = Synthetic oligonucleotide
  source 1..28: mol_type = other DNA
cctgtgaatagtcaactaaaatacaatt

SEQ ID NO: 26031 - DNA, 24 bp, synthetic construct
  misc_feature 1..24: note = Synthetic oligonucleotide
  source 1..24: mol_type = other DNA
cctgtgaattatcactaaaaatac

SEQ ID NO: 26032 - DNA, 28 bp, synthetic construct
  misc_feature 1..28: note = Synthetic oligonucleotide
  source 1..28: mol_type = other DNA
cctgtgaattatcactaaaaatacaatt

SEQ ID NO: 26033 - DNA, 33 bp, synthetic construct
  misc_feature 1..33: note = Synthetic oligonucleotide
  source 1..33: mol_type = other DNA
cctgtgaattatcctataaatataagaactgaa

SEQ ID NO: 26034 - DNA, 34 bp, synthetic construct
  misc_feature 1..34: note = Synthetic oligonucleotide
  source 1..34: mol_type = other DNA
cctgtgaattctccataaatttaaagaactgaaa

SEQ ID NO: 26035 - DNA, 37 bp, synthetic construct; identical to SEQ ID NO: 11664
  misc_feature 1..37: note = Synthetic oligonucleotide
  source 1..37: mol_type = other DNA

SEQ ID NO: 26036 - DNA, 24 bp, synthetic construct
  misc_feature 1..24: note = Synthetic oligonucleotide
  source 1..24: mol_type = other DNA
cgaaatctgaaagctaatcacagc

SEQ ID NO: 26037 - DNA, 37 bp, synthetic construct
  misc_feature 1..37: note = Synthetic oligonucleotide
  source 1..37: mol_type = other DNA
cgagacgaagttacttaaattgaaagccaattacaac

SEQ ID NO: 26038 - DNA, 38 bp, synthetic construct
  misc_feature 1..38: note = Synthetic oligonucleotide
  source 1..38: mol_type = other DNA
cgattctgccccccccggttttggaatcaaggcaaagc

SEQ ID NO: 26039 - DNA, 29 bp, synthetic construct
  misc_feature 1..29: note = Synthetic oligonucleotide
  source 1..29: mol_type = other DNA
cgcactctcacgagtgcgtggattgaaac

SEQ ID NO: 26040 - DNA, 37 bp, synthetic construct
  misc_feature 1..37: note = Synthetic oligonucleotide
  source 1..37: mol_type = other DNA
cgccgtggcttccctaccgatttccccgtggtaggct

SEQ ID NO: 26041 - DNA, 37 bp, synthetic construct
  misc_feature 1..37: note = Synthetic oligonucleotide
  source 1..37: mol_type = other DNA
cgccgtggtttccctaccgactcccatcgtgtaggct

SEQ ID NO: 26042 - DNA, 37 bp, synthetic construct
  misc_feature 1..37: note = Synthetic oligonucleotide
  source 1..37: mol_type = other DNA
cgctggggatggccgggagtcgccgctcaagtacact

SEQ ID NO: 26043 - DNA, 37 bp, synthetic construct
  misc_feature 1..37: note = Synthetic oligonucleotide
  source 1..37: mol_type = other DNA
cgctgtggcttgcggggaatcgtcgctcggatacact

SEQ ID NO: 26044 - DNA, 26 bp, synthetic construct
  misc_feature 1..26: note = Synthetic oligonucleotide
  source 1..26: mol_type = other DNA
cgcttgactcccctacaaaaacgcac

SEQ ID NO: 26045 - DNA, 38 bp, synthetic construct
  misc_feature 1..38: note = Synthetic oligonucleotide
  source 1..38: mol_type = other DNA
cgctttggatggctgggaatcgcggctttgatagactt

SEQ ID NO: 26046 - DNA, 31 bp, synthetic construct
  misc_feature 1..31: note = Synthetic oligonucleotide
  source 1..31: mol_type = other DNA
cggcaacccacttgtctacgaggattgcaac

SEQ ID NO: 26047 - DNA, 24 bp, synthetic construct
  misc_feature 1..24: note = Synthetic oligonucleotide
  source 1..24: mol_type = other DNA
cggtgaatagaagccctccccagc

SEQ ID NO: 26048 - DNA, 38 bp, synthetic construct
  misc_feature 1..38: note = Synthetic oligonucleotide
  source 1..38: mol_type = other DNA
cggttccgacaccccaccatcggaatgcctgatacact

SEQ ID NO: 26049 - DNA, 24 bp, synthetic construct
  misc_feature 1..24: note = Synthetic oligonucleotide
  source 1..24: mol_type = other DNA
cgtaatttgttcaggtactaaaat

SEQ ID NO: 26050 - DNA, 21 bp, synthetic construct
  misc_feature 1..21: note = Synthetic oligonucleotide
  source 1..21: mol_type = other DNA
cgtcctttatgacgggattgc

SEQ ID NO: 26051 - DNA, 35 bp, synthetic construct
  misc_feature 1..35: note = Synthetic oligonucleotide
  source 1..35: mol_type = other DNA
cgtcgccccccgcacaggggggcgtggattgaaat

SEQ ID NO: 26052 - DNA, 37 bp, synthetic construct
  misc_feature 1..37: note = Synthetic oligonucleotide
  source 1..37: mol_type = other DNA
cgtggtctaggtcattgatctgacaggcttctgaaac

SEQ ID NO: 26053 - DNA, 37 bp, synthetic construct
  misc_feature 1..37: note = Synthetic oligonucleotide
  source 1..37: mol_type = other DNA
cgttgcggttggaccgcgttttccggaatgctagcct

SEQ ID NO: 26054 - DNA, 37 bp, synthetic construct
  misc_feature 1..37: note = Synthetic oligonucleotide
  source 1..37: mol_type = other DNA
cgttgcggttggcctgcgatttctgaactgctaagcc

SEQ ID NO: 26055 - DNA, 37 bp, synthetic construct
  misc_feature 1..37: note = Synthetic oligonucleotide
  source 1..37: mol_type = other DNA
cgttgtaattccctgttatcacttggtatggtataat

SEQ ID NO: 26056 - DNA, 37 bp, synthetic construct
  misc_feature 1..37: note = Synthetic oligonucleotide
  source 1..37: mol_type = other DNA
cgttgtagctccctttctcatttcgcagtgctacaat

SEQ ID NO: 26057 - DNA, 37 bp, synthetic construct
  misc_feature 1..37: note = Synthetic oligonucleotide
  source 1..37: mol_type = other DNA
cgttgtatatgatacgattttgtcagctattcacaac

SEQ ID NO: 26058 - DNA, 37 bp, synthetic construct
  misc_feature 1..37: note = Synthetic oligonucleotide
  source 1..37: mol_type = other DNA
cgttgtatcttatcgaaattctacatcaaaccacaac

SEQ ID NO: 26059 - DNA, 37 bp, synthetic construct
  misc_feature 1..37: note = Synthetic oligonucleotide
  source 1..37: mol_type = other DNA
cgtttgagagtagtgtaattttatagggtactaaaac

SEQ ID NO: 26060 - DNA, 37 bp, synthetic construct
  misc_feature 1..37: note = Synthetic oligonucleotide
  source 1..37: mol_type = other DNA
cgtttgagagtagtgtcatatccaatccatctcaaac

SEQ ID NO: 26061 - DNA, 20 bp, synthetic construct
  misc_feature 1..20: note = Synthetic oligonucleotide
  source 1..20: mol_type = other DNA
cgtttgcggcagaccacagc

SEQ ID NO: 26062 - DNA, 36 bp, synthetic construct
  misc_feature 1..36: note = Synthetic oligonucleotide
  source 1..36: mol_type = other DNA
cgtttgtagaattcaaaatttacatatctctcaaac

SEQ ID NO: 26063 - DNA, 37 bp, synthetic construct
  misc_feature 1..37: note = Synthetic oligonucleotide
  source 1..37: mol_type = other DNA
cgttttgatttgccccctattacagacacgttaaact

SEQ ID NO: 26064 - DNA, 32 bp, synthetic construct
  misc_feature 1..32: note = Synthetic oligonucleotide
  source 1..32: mol_type = other DNA
ctaaagatacaattttgaaagcaattcacaac

SEQ ID NO: 26065 - DNA, 25 bp, synthetic construct
  misc_feature 1..25: note = Synthetic oligonucleotide
  source 1..25: mol_type = other DNA
ctaacaatttagatattggtataat

SEQ ID NO: 26066 - DNA, 25 bp, synthetic construct
  misc_feature 1..25: note = Synthetic oligonucleotide
  source 1..25: mol_type = other DNA
ctaatagctcttggtatggtataat

SEQ ID NO: 26067 - DNA, 25 bp, synthetic construct
  misc_feature 1..25: note = Synthetic oligonucleotide
  source 1..25: mol_type = other DNA
ctaatagctcttggtatggtataat

SEQ ID NO: 26068 - DNA, 25 bp, synthetic construct
  misc_feature 1..25: note = Synthetic oligonucleotide
  source 1..25: mol_type = other DNA
ctaatagctcttggtatggtataat

SEQ ID NO: 26069 - DNA, 25 bp, synthetic construct
  misc_feature 1..25: note = Synthetic oligonucleotide
  source 1..25: mol_type = other DNA
ctaatagctcttggtatggtataat

SEQ ID NO: 26070 - DNA, 27 bp, synthetic construct
  misc_feature 1..27: note = Synthetic oligonucleotide
  source 1..27: mol_type = other DNA
ctacaaaatttgaaagcaattcacaac

SEQ ID NO: 26071 - DNA, 25 bp, synthetic construct
  misc_feature 1..25: note = Synthetic oligonucleotide
  source 1..25: mol_type = other DNA
ctacgaaaacgcacagctctcaaac

SEQ ID NO: 26072 - DNA, 21 bp, synthetic construct
  misc_feature 1..21: note = Synthetic oligonucleotide
  source 1..21: mol_type = other DNA
ctactgcttagattacggtac

SEQ ID NO: 26073 - DNA, 36 bp, synthetic construct
  misc_feature 1..36: note = Synthetic oligonucleotide
  source 1..36: mol_type = other DNA
ctagtctaccagctgtaacggagagtgatttccaac

SEQ ID NO: 26074 - DNA, 30 bp, synthetic construct
  misc_feature 1..30: note = Synthetic oligonucleotide
  source 1..30: mol_type = other DNA
ctagtctagccgattgggatatgcgctctg

SEQ ID NO: 26075 - DNA, 29 bp, synthetic construct
  misc_feature 1..29: note = Synthetic oligonucleotide
  source 1..29: mol_type = other DNA
ctataaatctatccatactggattttaaa

SEQ ID NO: 26076 - DNA, 30 bp, synthetic construct
  misc_feature 1..30: note = Synthetic oligonucleotide
  source 1..30: mol_type = other DNA
ctataaatctatccatactggattttaaat

SEQ ID NO: 26077 - DNA, 30 bp, synthetic construct; identical to SEQ ID NO: 26076
  misc_feature 1..30: note = Synthetic oligonucleotide
  source 1..30: mol_type = other DNA

SEQ ID NO: 26078 - DNA, 30 bp, synthetic construct; identical to SEQ ID NO: 26076
  misc_feature 1..30: note = Synthetic oligonucleotide
  source 1..30: mol_type = other DNA

SEQ ID NO: 26079 - DNA, 22 bp, synthetic construct
  misc_feature 1..22: note = Synthetic oligonucleotide
  source 1..22: mol_type = other DNA
ctatctctcgctaaggtataat

SEQ ID NO: 26080 - DNA, 22 bp, synthetic construct
  misc_feature 1..22: note = Synthetic oligonucleotide
  source 1..22: mol_type = other DNA
ctatctctcgctaaggtataat

SEQ ID NO: 26081 - DNA, 25 bp, synthetic construct
  misc_feature 1..25: note = Synthetic oligonucleotide
  source 1..25: mol_type = other DNA
ctatgaatttacactgctctcaaac

SEQ ID NO: 26082 - DNA, 25 bp, synthetic construct
  misc_feature 1..25: note = Synthetic oligonucleotide
  source 1..25: mol_type = other DNA
ctatgaatttacactgctctcaaac

SEQ ID NO: 26083 - DNA, 38 bp, synthetic construct
  misc_feature 1..38: note = Synthetic oligonucleotide
  source 1..38: mol_type = other DNA
ctattgtaggcatccggggtgagagagggagctacaac

SEQ ID NO: 26084 - DNA, 36 bp, synthetic construct
  misc_feature 1..36: note = Synthetic oligonucleotide
  source 1..36: mol_type = other DNA
ctctaatataccatcaaaaaacactcaaatcaaaac

SEQ ID NO: 26085 - DNA, 25 bp, synthetic construct
  misc_feature 1..25: note = Synthetic oligonucleotide
  source 1..25: mol_type = other DNA
ctctcaagattaggtaagtaacatc

SEQ ID NO: 26086 - DNA, 30 bp, synthetic construct
  misc_feature 1..30: note = Synthetic oligonucleotide
  source 1..30: mol_type = other DNA
ctctgaattgtactatattagtatcgcgac

SEQ ID NO: 26087 - DNA, 30 bp, synthetic construct; identical to SEQ ID NO: 11705
  misc_feature 1..30: note = Synthetic oligonucleotide
  source 1..30: mol_type = other DNA

SEQ ID NO: 26088 - DNA, 19 bp, synthetic construct
  misc_feature 1..19: note = Synthetic oligonucleotide
  source 1..19: mol_type = other DNA
ctcttagataatagacaaa

SEQ ID NO: 26089 - DNA, 38 bp, synthetic construct
  misc_feature 1..38: note = Synthetic oligonucleotide
  source 1..38: mol_type = other DNA
ctgaagtatatcagggatctagagagttgaaccccagc

SEQ ID NO: 26090 - DNA, 25 bp, synthetic construct
  misc_feature 1..25: note = Synthetic oligonucleotide
  source 1..25: mol_type = other DNA
ctgatggatattgataaacttatac

SEQ ID NO: 26091 - DNA, 25 bp, synthetic construct
  misc_feature 1..25: note = Synthetic oligonucleotide
  source 1..25: mol_type = other DNA
ctgatgtttcttgttgtggtataat

SEQ ID NO: 26092 - DNA, 32 bp, synthetic construct
  misc_feature 1..32: note = Synthetic oligonucleotide
  source 1..32: mol_type = other DNA
ctggcaacccacttgtctacgaggattgcaac

SEQ ID NO: 26093 - DNA, 32 bp, synthetic construct; identical to SEQ ID NO: 26092
  misc_feature 1..32: note = Synthetic oligonucleotide
  source 1..32: mol_type = other DNA

SEQ ID NO: 26094 - DNA, 35 bp, synthetic construct
  misc_feature 1..35: note = Synthetic oligonucleotide
  source 1..35: mol_type = other DNA
ctggggatggccgggaatcaccgctcacgtacact

SEQ ID NO: 26095 - DNA, 36 bp, synthetic construct
  misc_feature 1..36: note = Synthetic oligonucleotide
  source 1..36: mol_type = other DNA
ctggggttcgactctagataatccctgatatgcttg

SEQ ID NO: 26096 - DNA, 25 bp, synthetic construct
  misc_feature 1..25: note = Synthetic oligonucleotide
  source 1..25: mol_type = other DNA
ctgtcactatgttattctgtcttaa

SEQ ID NO: 26097 - DNA, 35 bp, synthetic construct; identical to SEQ ID NO: 11708
  misc_feature 1..35: note = Synthetic oligonucleotide
  source 1..35: mol_type = other DNA

SEQ ID NO: 26098 - DNA, 25 bp, synthetic construct
  misc_feature 1..25: note = Synthetic oligonucleotide
  source 1..25: mol_type = other DNA
ctgttaaaacaaaaggttatcaaac

SEQ ID NO: 26099 - DNA, 38 bp, synthetic construct
  misc_feature 1..38: note = Synthetic oligonucleotide
  source 1..38: mol_type = other DNA
ctgtttgagtaccatacatttttacatcattctcaaac

SEQ ID NO: 26100 - DNA, 26 bp, synthetic construct
  misc_feature 1..26: note = Synthetic oligonucleotide
  source 1..26: mol_type = other DNA
cttacaaaacaacaaagctctcaaac

SEQ ID NO: 26101 - DNA, 36 bp, synthetic construct; identical to SEQ ID NO: 11712
  misc_feature 1..36: note = Synthetic oligonucleotide
  source 1..36: mol_type = other DNA

SEQ ID NO: 26102 - DNA, 36 bp, synthetic construct; identical to SEQ ID NO: 11712
  misc_feature 1..36: note = Synthetic oligonucleotide
  source 1..36: mol_type = other DNA

SEQ ID NO: 26103 - DNA, 36 bp, synthetic construct
  misc_feature 1..36: note = Synthetic oligonucleotide
  source 1..36: mol_type = other DNA
cttacaatcgacacttaaataatttgcatgtgtaag

SEQ ID NO: 26104 - DNA, 30 bp, synthetic construct
  misc_feature 1..30: note = Synthetic oligonucleotide
  source 1..30: mol_type = other DNA
cttaccacagtgccccggtgggggcgagat

SEQ ID NO: 26105 - DNA, 30 bp, synthetic construct
  misc_feature 1..30: note = Synthetic oligonucleotide
  source 1..30: mol_type = other DNA
cttataatcgcaccagaatggaattgaaat

SEQ ID NO: 26106 - DNA, 36 bp, synthetic construct
  misc_feature 1..36: note = Synthetic oligonucleotide
  source 1..36: mol_type = other DNA
cttatagtcccctaataatttcgacagtagtataat

SEQ ID NO: 26107 - DNA, 36 bp, synthetic construct; identical to SEQ ID NO: 26106
  misc_feature 1..36: note = Synthetic oligonucleotide
  source 1..36: mol_type = other DNA

SEQ ID NO: 26108 - DNA, 36 bp, synthetic construct
  misc_feature 1..36: note = Synthetic oligonucleotide
  source 1..36: mol_type = other DNA
cttatgtaaatatacaatttgaaatcaattcacaac

SEQ ID NO: 26109 - DNA, 36 bp, synthetic construct
  misc_feature 1..36: note = Synthetic oligonucleotide
  source 1..36: mol_type = other DNA
cttcaccttacctcaaatgtggaaccaaggcaaagc

SEQ ID NO: 26110 - DNA, 36 bp, synthetic construct
  misc_feature 1..36: note = Synthetic oligonucleotide
  source 1..36: mol_type = other DNA
cttcagtttagcatacgtttttcatcattctcaaac

SEQ ID NO: 26111 - DNA, 30 bp, synthetic construct
  misc_feature 1..30: note = Synthetic oligonucleotide
  source 1..30: mol_type = other DNA
cttctaatcgcaccacactggaattgaaac

SEQ ID NO: 26112 - DNA, 22 bp, synthetic construct
  misc_feature 1..22: note = Synthetic oligonucleotide
  source 1..22: mol_type = other DNA
cttcttcgatgtctgtccggtg

SEQ ID NO: 26113 - DNA, 29 bp, synthetic construct
  misc_feature 1..29: note = Synthetic oligonucleotide
  source 1..29: mol_type = other DNA
cttgaatccaaaataaggcacagtacagt

SEQ ID NO: 26114 - DNA, 28 bp, synthetic construct
  misc_feature 1..28: note = Synthetic oligonucleotide
  source 1..28: mol_type = other DNA
cttgtccccacacgcgtggggatgatcc

SEQ ID NO: 26115 - DNA, 36 bp, synthetic construct
  misc_feature 1..36: note = Synthetic oligonucleotide
  source 1..36: mol_type = other DNA
cttgttgttgcccacagttcggtgtctgtttccaac

SEQ ID NO: 26116 - DNA, 34 bp, synthetic construct
  misc_feature 1..34: note = Synthetic oligonucleotide
  source 1..34: mol_type = other DNA
ctttcaaattcgtaactttgtgacctcaaacaac

SEQ ID NO: 26117 - DNA, 35 bp, synthetic construct
  misc_feature 1..35: note = Synthetic oligonucleotide
  source 1..35: mol_type = other DNA
ctttcaaattttgtagttttgtgattgataacaac

SEQ ID NO: 26118 - DNA, 37 bp, synthetic construct
  misc_feature 1..37: note = Synthetic oligonucleotide
  source 1..37: mol_type = other DNA
ctttcaccctagctttaccctccggcagggttacaat

SEQ ID NO: 26119 - DNA, 37 bp, synthetic construct; identical to SEQ ID NO: 11730
  misc_feature 1..37: note = Synthetic oligonucleotide
  source 1..37: mol_type = other DNA

SEQ ID NO: 26120 - DNA, 38 bp, synthetic construct
  misc_feature 1..38: note = Synthetic oligonucleotide
  source 1..38: mol_type = other DNA
ctttcactctagcctttcctctgggcgggacttacaat

SEQ ID NO: 26121 - DNA, 37 bp, synthetic construct
  misc_feature 1..37: note = Synthetic oligonucleotide
  source 1..37: mol_type = other DNA
ctttcactctagcttttgcttcgcgggcgggtacaat

SEQ ID NO: 26122 - DNA, 38 bp, synthetic construct
  misc_feature 1..38: note = Synthetic oligonucleotide
  source 1..38: mol_type = other DNA
ctttcactctagtctttcttgcgggcgggatttacaat

SEQ ID NO: 26123 - DNA, 38 bp, synthetic construct
  misc_feature 1..38: note = Synthetic oligonucleotide
  source 1..38: mol_type = other DNA
ctttcagtgttgactacagccgcgcgcgcggctgaaat

SEQ ID NO: 26124 - DNA, 36 bp, synthetic construct
  misc_feature 1..36: note = Synthetic oligonucleotide
  source 1..36: mol_type = other DNA
ctttcattttagtatctttgaaccattagaaacaac

SEQ ID NO: 26125 - DNA, 36 bp, synthetic construct
  misc_feature 1..36: note = Synthetic oligonucleotide
  source 1..36: mol_type = other DNA
ctttccgcggcagtaatgccgcggcctcattgaagc

SEQ ID NO: 26126 - DNA, 20 bp, synthetic construct
  misc_feature 1..20: note = Synthetic oligonucleotide
  source 1..20: mol_type = other DNA
cttttaatcgaaccgtttgg

SEQ ID NO: 26127 - DNA, 36 bp, synthetic construct
  misc_feature 1..36: note = Synthetic oligonucleotide
  source 1..36: mol_type = other DNA
cttttacagtcacgtaaattattcagttactaaaat

SEQ ID NO: 26128 - DNA, 36 bp, synthetic construct; identical to SEQ ID NO: 26127
  misc_feature 1..36: note = Synthetic oligonucleotide
  source 1..36: mol_type = other DNA

SEQ ID NO: 26129 - DNA, 36 bp, synthetic construct; identical to SEQ ID NO: 26127
  misc_feature 1..36: note = Synthetic oligonucleotide
  source 1..36: mol_type = other DNA

SEQ ID NO: 26130 - DNA, 36 bp, synthetic construct; identical to SEQ ID NO: 26127
  misc_feature 1..36: note = Synthetic oligonucleotide
  source 1..36: mol_type = other DNA

SEQ ID NO: 26131 - DNA, 21 bp, synthetic construct
  misc_feature 1..21: note = Synthetic oligonucleotide
  source 1..21: mol_type = other DNA
gaaacaaccagggtctataac

SEQ ID NO: 26132 - DNA, 28 bp, synthetic construct
  misc_feature 1..28: note = Synthetic oligonucleotide
  source 1..28: mol_type = other DNA
gaaacaaccccgctagtgcgggggaaca

SEQ ID NO: 26133 - DNA, 28 bp, synthetic construct
  misc_feature 1..28: note = Synthetic oligonucleotide
  source 1..28: mol_type = other DNA
gaaacacccccacgggggtggggaagat

SEQ ID NO: 26134 - DNA, 22 bp, synthetic construct
  misc_feature 1..22: note = Synthetic oligonucleotide
  source 1..22: mol_type = other DNA
gaaatctgaactatggcaaagc

SEQ ID NO: 26135 - DNA, 36 bp, synthetic construct
  misc_feature 1..36: note = Synthetic oligonucleotide
  source 1..36: mol_type = other DNA
gaacttaaccttattaatatgaccactattcaagac

SEQ ID NO: 26136 - DNA, 36 bp, synthetic construct; identical to SEQ ID NO: 26135
  misc_feature 1..36: note = Synthetic oligonucleotide
  source 1..36: mol_type = other DNA

SEQ ID NO: 26137 - DNA, 36 bp, synthetic construct
  misc_feature 1..36: note = Synthetic oligonucleotide
  source 1..36: mol_type = other DNA
gaagactagttgggatattgaacgacacttcccaac

SEQ ID NO: 26138 - DNA, 32 bp, synthetic construct
  misc_feature 1..32: note = Synthetic oligonucleotide
  source 1..32: mol_type = other DNA
gaagataataaattttgaaagcaattcacaac

SEQ ID NO: 26139 - DNA, 36 bp, synthetic construct
  misc_feature 1..36: note = Synthetic oligonucleotide
  source 1..36: mol_type = other DNA
gaagcctaccagggggattgaagactgattcccagc

SEQ ID NO: 26140 - DNA, 36 bp, synthetic construct; identical to SEQ ID NO: 11745
  misc_feature 1..36: note = Synthetic oligonucleotide
  source 1..36: mol_type = other DNA

SEQ ID NO: 26141 - DNA, 36 bp, synthetic construct; identical to SEQ ID NO: 11745
  misc_feature 1..36: note = Synthetic oligonucleotide
  source 1..36: mol_type = other DNA

SEQ ID NO: 26142 - DNA, 36 bp, synthetic construct
  misc_feature 1..36: note = Synthetic oligonucleotide
  source 1..36: mol_type = other DNA
gaagtctaccagggggtttgagagttgatccccagc

SEQ ID NO: 26143 - DNA, 36 bp, synthetic construct; identical to SEQ ID NO: 11750
  misc_feature 1..36: note = Synthetic oligonucleotide
  source 1..36: mol_type = other DNA

SEQ ID NO: 26144 - DNA, 36 bp, synthetic construct
  misc_feature 1..36: note = Synthetic oligonucleotide
  source 1..36: mol_type = other DNA
gaagtctatacgggggattggggactgattcccagc

SEQ ID NO: 26145 - DNA, 36 bp, synthetic construct
  misc_feature 1..36: note = Synthetic oligonucleotide
  source 1..36: mol_type = other DNA
gaagtctatcaagaggattggtaactgattcccaac

SEQ ID NO: 26146 - DNA, 36 bp, synthetic construct
  misc_feature 1..36: note = Synthetic oligonucleotide
  source 1..36: mol_type = other DNA
gaagtctatcaagggggctggtgactgattcccagc

SEQ ID NO: 26147 - DNA, 36 bp, synthetic construct; identical to SEQ ID NO: 11753
  misc_feature 1..36: note = Synthetic oligonucleotide
  source 1..36: mol_type = other DNA

SEQ ID NO: 26148 - DNA, 36 bp, synthetic construct; identical to SEQ ID NO: 11754
  misc_feature 1..36: note = Synthetic oligonucleotide
  source 1..36: mol_type = other DNA

SEQ ID NO: 26149 - DNA, 36 bp, synthetic construct; identical to SEQ ID NO: 11755
  misc_feature 1..36: note = Synthetic oligonucleotide
  source 1..36: mol_type = other DNA

SEQ ID NO: 26150 - DNA, 36 bp, synthetic construct; identical to SEQ ID NO: 11755
  misc_feature 1..36: note = Synthetic oligonucleotide
  source 1..36: mol_type = other DNA

SEQ ID NO: 26151 - DNA, 36 bp, synthetic construct; identical to SEQ ID NO: 11755
  misc_feature 1..36: note = Synthetic oligonucleotide
  source 1..36: mol_type = other DNA

SEQ ID NO: 26152 - DNA, 36 bp, synthetic construct; identical to SEQ ID NO: 11755
  misc_feature 1..36: note = Synthetic oligonucleotide
  source 1..36: mol_type = other DNA

SEQ ID NO: 26153 - DNA, 36 bp, synthetic construct
  misc_feature 1..36: note = Synthetic oligonucleotide
  source 1..36: mol_type = other DNA
gaagtctatcaggggtaatgagaactgaaccccagc

SEQ ID NO: 26154 - DNA, 29 bp, synthetic construct
  misc_feature 1..29: note = Synthetic oligonucleotide
  source 1..29: mol_type = other DNA
gaataagtttatcaatattcatcagagag

SEQ ID NO: 26155 - DNA, 36 bp, synthetic construct; identical to SEQ ID NO: 11757
  misc_feature 1..36: note = Synthetic oligonucleotide
  source 1..36: mol_type = other DNA

SEQ ID NO: 26156 - DNA, 37 bp, synthetic construct
  misc_feature 1..37: note = Synthetic oligonucleotide
  source 1..37: mol_type = other DNA
gaatgagcaccctctgaaatagcacgggtctcaaacc

SEQ ID NO: 26157 - DNA, 38 bp, synthetic construct
  misc_feature 1..38: note = Synthetic oligonucleotide
  source 1..38: mol_type = other DNA
gaatttacgtacaaaaactttgaaagcaaactacaacg

SEQ ID NO: 26158 - DNA, 31 bp, synthetic construct
  misc_feature 1..31: note = Synthetic oligonucleotide
  source 1..31: mol_type = other DNA
gaatttgtaactttgaactatcggaaacacc

SEQ ID NO: 26159 - DNA, 27 bp, synthetic construct
  misc_feature 1..27: note = Synthetic oligonucleotide
  source 1..27: mol_type = other DNA
gaccgggaatcgccgctcagatacact

SEQ ID NO: 26160 - DNA, 37 bp, synthetic construct
  misc_feature 1..37: note = Synthetic oligonucleotide
  source 1..37: mol_type = other DNA
gactttatcaggcattccgatggtggggtatcggaac

SEQ ID NO: 26161 - DNA, 36 bp, synthetic construct; identical to SEQ ID NO: 11762
  misc_feature 1..36: note = Synthetic oligonucleotide
  source 1..36: mol_type = other DNA

SEQ ID NO: 26162 - DNA, 36 bp, synthetic construct
  misc_feature 1..36: note = Synthetic oligonucleotide
  source 1..36: mol_type = other DNA
gagatctaccttattggtttaacgtctttctaaaac

SEQ ID NO: 26163 - DNA, 29 bp, synthetic construct
  misc_feature 1..29: note = Synthetic oligonucleotide
  source 1..29: mol_type = other DNA
gagcctaccacagggaaatcggtagggaa

SEQ ID NO: 26164 - DNA, 37 bp, synthetic construct
  misc_feature 1..37: note = Synthetic oligonucleotide
  source 1..37: mol_type = other DNA
gagcctaccacagggaaatcggtagggaagccacggc

SEQ ID NO: 26165 - DNA, 37 bp, synthetic construct; identical to SEQ ID NO: 11769
  misc_feature 1..37: note = Synthetic oligonucleotide
  source 1..37: mol_type = other DNA

SEQ ID NO: 26166 - DNA, 37 bp, synthetic construct
  misc_feature 1..37: note = Synthetic oligonucleotide
  source 1..37: mol_type = other DNA
gagcgaagtagatcaggaaatgcgctctcgccggaac

SEQ ID NO: 26167 - DNA, 26 bp, synthetic construct
  misc_feature 1..26: note = Synthetic oligonucleotide
  source 1..26: mol_type = other DNA
gagcgcatttcccagtgatctagact

SEQ ID NO: 26168 - DNA, 37 bp, synthetic construct; identical to SEQ ID NO: 11771
  misc_feature 1..37: note = Synthetic oligonucleotide
  source 1..37: mol_type = other DNA

SEQ ID NO: 26169 - DNA, 37 bp, synthetic construct; identical to SEQ ID NO: 11771
  misc_feature 1..37: note = Synthetic oligonucleotide
  source 1..37: mol_type = other DNA

SEQ ID NO: 26170 - DNA, 37 bp, synthetic construct; identical to SEQ ID NO: 11771
  misc_feature 1..37: note = Synthetic oligonucleotide
  source 1..37: mol_type = other DNA

SEQ ID NO: 26171 - DNA, 37 bp, synthetic construct; identical to SEQ ID NO: 11772
  misc_feature 1..37: note = Synthetic oligonucleotide
  source 1..37: mol_type = other DNA

SEQ ID NO: 26172 - DNA, 37 bp, synthetic construct; identical to SEQ ID NO: 11776
  misc_feature 1..37: note = Synthetic oligonucleotide
  source 1..37: mol_type = other DNA

SEQ ID NO: 26173 - DNA, 38 bp, synthetic construct
  misc_feature 1..38: note = Synthetic oligonucleotide
  source 1..38: mol_type = other DNA
gagcttagcatggatgggtctgcagggaacccatgaca

SEQ ID NO: 26174 - DNA, 37 bp, synthetic construct
  misc_feature 1..37: note = Synthetic oligonucleotide
  source 1..37: mol_type = other DNA
gaggatctctcccccgcgtttggaatcaaggcaaagc

SEQ ID NO: 26175 - DNA, 37 bp, synthetic construct; identical to SEQ ID NO: 11781
  misc_feature 1..37: note = Synthetic oligonucleotide
  source 1..37: mol_type = other DNA

SEQ ID NO: 26176 - DNA, 37 bp, synthetic construct
  misc_feature 1..37: note = Synthetic oligonucleotide
  source 1..37: mol_type = other DNA
gaggttatcaggcattccgatggtggggtatcggaac

SEQ ID NO: 26177 - DNA, 37 bp, synthetic construct; identical to SEQ ID NO: 11782
  misc_feature 1..37: note = Synthetic oligonucleotide
  source 1..37: mol_type = other DNA

SEQ ID NO: 26178 - DNA, 37 bp, synthetic construct; identical to SEQ ID NO: 11782
  misc_feature 1..37: note = Synthetic oligonucleotide
  source 1..37: mol_type = other DNA

SEQ ID NO: 26179 - DNA, 38 bp, synthetic construct
  misc_feature 1..38: note = Synthetic oligonucleotide
  source 1..38: mol_type = other DNA
gagtctaatcaatcccggcctgcaagcaatccgcaaca

SEQ ID NO: 26180 - DNA, 37 bp, synthetic construct
  misc_feature 1..37: note = Synthetic oligonucleotide
  source 1..37: mol_type = other DNA
gagtctatcaaagcggcgatccccaaccagccaaagc

SEQ ID NO: 26181 - DNA, 37 bp, synthetic construct
  misc_feature 1..37: note = Synthetic oligonucleotide
  source 1..37: mol_type = other DNA
gagtctatcaagaagcggattccaggccatccaaagc

SEQ ID NO: 26182 - DNA, 37 bp, synthetic construct; identical to SEQ ID NO: 11784
  misc_feature 1..37: note = Synthetic oligonucleotide
  source 1..37: mol_type = other DNA

SEQ ID NO: 26183 - DNA, 37 bp, synthetic construct
  misc_feature 1..37: note = Synthetic oligonucleotide
  source 1..37: mol_type = other DNA
gagtctatccaatcccgttctgtgagcaatccgcaac

SEQ ID NO: 26184 - DNA, 37 bp, synthetic construct
  misc_feature 1..37: note = Synthetic oligonucleotide
  source 1..37: mol_type = other DNA
gagtgtaactgatcagagcccgcgagcaatccacaac

SEQ ID NO: 26185 - DNA, 38 bp, synthetic construct
  misc_feature 1..38: note = Synthetic oligonucleotide
  source 1..38: mol_type = other DNA
gagtgtacatgagcggtgattcccggccatccccagcc

SEQ ID NO: 26186 - DNA, 37 bp, synthetic construct
  misc_feature 1..37: note = Synthetic oligonucleotide
  source 1..37: mol_type = other DNA
gagtgtagccatccggggtgagagagggagctacaac

SEQ ID NO: 26187 - DNA, 37 bp, synthetic construct
  misc_feature 1..37: note = Synthetic oligonucleotide
  source 1..37: mol_type = other DNA
gagtgtagccgatgggggaatgggggccaaccgcaac

SEQ ID NO: 26188 - DNA, 37 bp, synthetic construct; identical to SEQ ID NO: 11785
  misc_feature 1..37: note = Synthetic oligonucleotide
  source 1..37: mol_type = other DNA

SEQ ID NO: 26189 - DNA, 37 bp, synthetic construct; identical to SEQ ID NO: 11785
  misc_feature 1..37: note = Synthetic oligonucleotide
  source 1..37: mol_type = other DNA

SEQ ID NO: 26190 - DNA, 37 bp, synthetic construct; identical to SEQ ID NO: 11785
  misc_feature 1..37: note = Synthetic oligonucleotide
  source 1..37: mol_type = other DNA

SEQ ID NO: 26191 - DNA, 37 bp, synthetic construct; identical to SEQ ID NO: 11785
  misc_feature 1..37: note = Synthetic oligonucleotide
  source 1..37: mol_type = other DNA

SEQ ID NO: 26192 - DNA, 37 bp, synthetic construct; identical to SEQ ID NO: 11785
  misc_feature 1..37: note = Synthetic oligonucleotide
  source 1..37: mol_type = other DNA

SEQ ID NO: 26193 - DNA, 31 bp, synthetic construct
  misc_feature 1..31: note = Synthetic oligonucleotide
  source 1..31: mol_type = other DNA
gagtgtatcaaagaggccgttcccgaccagc

SEQ ID NO: 26194 - DNA, 38 bp, synthetic construct
  misc_feature 1..38: note = Synthetic oligonucleotide
  source 1..38: mol_type = other DNA
gagtgtatcaagcattccgatggtggggtatcggaaca

SEQ ID NO: 26195 - DNA, 37 bp, synthetic construct; identical to SEQ ID NO: 11788
  misc_feature 1..37: note = Synthetic oligonucleotide
  source 1..37: mol_type = other DNA

SEQ ID NO: 26196 - DNA, 38 bp, synthetic construct
  misc_feature 1..38: note = Synthetic oligonucleotide
  source 1..38: mol_type = other DNA
gagttgcggttgctccccgatctcccatcggctataat

SEQ ID NO: 26197 - DNA, 38 bp, synthetic construct; identical to SEQ ID NO: 26196
  misc_feature 1..38: note = Synthetic oligonucleotide
  source 1..38: mol_type = other DNA

SEQ ID NO: 26198 - DNA, 37 bp, synthetic construct
  misc_feature 1..37: note = Synthetic oligonucleotide
  source 1..37: mol_type = other DNA
gagtttatcaggcattccgatggtggggtatcggaac

SEQ ID NO: 26199 - DNA, 32 bp, synthetic construct
  misc_feature 1..32: note = Synthetic oligonucleotide
  source 1..32: mol_type = other DNA
gataaagatacaatttgaaagcaaatcacaac

SEQ ID NO: 26200 - DNA, 36 bp, synthetic construct
  misc_feature 1..36: note = Synthetic oligonucleotide
  source 1..36: mol_type = other DNA
gataaaggaatatctaatttaacaatactctcaagc

SEQ ID NO: 26201 - DNA, 36 bp, synthetic construct; identical to SEQ ID NO: 11790
  misc_feature 1..36: note = Synthetic oligonucleotide
  source 1..36: mol_type = other DNA

SEQ ID NO: 26202 - DNA, 36 bp, synthetic construct; identical to SEQ ID NO: 11792
  misc_feature 1..36: note = Synthetic oligonucleotide
  source 1..36: mol_type = other DNA

SEQ ID NO: 26203 - DNA, 36 bp, synthetic construct
  misc_feature 1..36: note = Synthetic oligonucleotide
  source 1..36: mol_type = other DNA
gataccagatagctccggggggagcgagatcaaaac

SEQ ID NO: 26204 - DNA, 37 bp, synthetic construct
  misc_feature 1..37: note = Synthetic oligonucleotide
  source 1..37: mol_type = other DNA
gatactccaagcctcggaattggaatcaaggcaaagc

SEQ ID NO: 26205 - DNA, 37 bp, synthetic construct; identical to SEQ ID NO: 11793
  misc_feature 1..37: note = Synthetic oligonucleotide
  source 1..37: mol_type = other DNA

SEQ ID NO: 26206 - DNA, 38 bp, synthetic construct
  misc_feature 1..38: note = Synthetic oligonucleotide
  source 1..38: mol_type = other DNA
gatactgcaaaagtacgattttccaagcaaatcacaac

SEQ ID NO: 26207 - DNA, 38 bp, synthetic construct
  misc_feature 1..38: note = Synthetic oligonucleotide
  source 1..38: mol_type = other DNA
gatactgcaaaagtacgatttttcaagcaaatcacaac

SEQ ID NO: 26208 - DNA, 38 bp, synthetic construct
  misc_feature 1..38: note = Synthetic oligonucleotide
  source 1..38: mol_type = other DNA
gatacttcaaagatactaaaatgaaagcaaatcacaac

SEQ ID NO: 26209 - DNA, 38 bp, synthetic construct
  misc_feature 1..38: note = Synthetic oligonucleotide
  source 1..38: mol_type = other DNA
gatagtacaaagatactaattttaaagcaattcacaac

SEQ ID NO: 26210 - DNA, 38 bp, synthetic construct; identical to SEQ ID NO: 26209
  misc_feature 1..38: note = Synthetic oligonucleotide
  source 1..38: mol_type = other DNA

SEQ ID NO: 26211 - DNA, 38 bp, synthetic construct; identical to SEQ ID NO: 26209
  misc_feature 1..38: note = Synthetic oligonucleotide
  source 1..38: mol_type = other DNA

SEQ ID NO: 26212 - DNA, 38 bp, synthetic construct; identical to SEQ ID NO: 26209
  misc_feature 1..38: note = Synthetic oligonucleotide
  source 1..38: mol_type = other DNA

SEQ ID NO: 26213 - DNA, 38 bp, synthetic construct; identical to SEQ ID NO: 26209
  misc_feature 1..38: note = Synthetic oligonucleotide
  source 1..38: mol_type = other DNA

SEQ ID NO: 26214 - DNA, 36 bp, synthetic construct
  misc_feature 1..36: note = Synthetic oligonucleotide
  source 1..36: mol_type = other DNA
gatatagcagttcagaaatcgcggtccagctgcaac

SEQ ID NO: 26215 - DNA, 36 bp, synthetic construct; identical to SEQ ID NO: 26214
  misc_feature 1..36: note = Synthetic oligonucleotide
  source 1..36: mol_type = other DNA

SEQ ID NO: 26216 - DNA, 36 bp, synthetic construct
  misc_feature 1..36: note = Synthetic oligonucleotide
  source 1..36: mol_type = other DNA
gatatatcttattcaattttttaatcaaaccacaac

SEQ ID NO: 26217 - DNA, 36 bp, synthetic construct; identical to SEQ ID NO: 11796
  misc_feature 1..36: note = Synthetic oligonucleotide
  source 1..36: mol_type = other DNA

SEQ ID NO: 26218 - DNA, 37 bp, synthetic construct
  misc_feature 1..37: note = Synthetic oligonucleotide
  source 1..37: mol_type = other DNA
gatcatagcactctggtgattgagggcctatagcaac

SEQ ID NO: 26219 - DNA, 36 bp, synthetic construct
  misc_feature 1..36: note = Synthetic oligonucleotide
  source 1..36: mol_type = other DNA
gatctaaaccttattgatctaacaaccatctaaaac

SEQ ID NO: 26220 - DNA, 36 bp, synthetic construct
  misc_feature 1..36: note = Synthetic oligonucleotide
  source 1..36: mol_type = other DNA
gatgaactactgcttggtttacggtacctctgaaac

SEQ ID NO: 26221 - DNA, 36 bp, synthetic construct
  misc_feature 1..36: note = Synthetic oligonucleotide
  source 1..36: mol_type = other DNA
gatgcaaatgatactaatctgtaatcagttcacaac

SEQ ID NO: 26222 - DNA, 32 bp, synthetic construct
  misc_feature 1..32: note = Synthetic oligonucleotide
  source 1..32: mol_type = other DNA
gatgcaacttagccccgcaaggggacggttac

SEQ ID NO: 26223 - DNA, 37 bp, synthetic construct
  misc_feature 1..37: note = Synthetic oligonucleotide
  source 1..37: mol_type = other DNA
gatgctccgcgccccggatttggaatcaaggcaaagc

SEQ ID NO: 26224 - DNA, 37 bp, synthetic construct
  misc_feature 1..37: note = Synthetic oligonucleotide
  source 1..37: mol_type = other DNA
gatgctccgctccgcgaatttggaatcaaggcaaagc

SEQ ID NO: 26225 - DNA, 37 bp, synthetic construct
  misc_feature 1..37: note = Synthetic oligonucleotide
  source 1..37: mol_type = other DNA
gatgctctgcgcctcggaattggaatcaaggcaaagc

SEQ ID NO: 26226 - DNA, 37 bp, synthetic construct
  misc_feature 1..37: note = Synthetic oligonucleotide
  source 1..37: mol_type = other DNA
gatgctctgcgcctctgaattggaatcaaggcaaagc

SEQ ID NO: 26227 - DNA, 36 bp, synthetic construct
  misc_feature 1..36: note = Synthetic oligonucleotide
  source 1..36: mol_type = other DNA
gatgcttttgattccaaagaactgtcaatccacaac

SEQ ID NO: 26228 - DNA, 36 bp, synthetic construct
  misc_feature 1..36: note = Synthetic oligonucleotide
  source 1..36: mol_type = other DNA
gatggcagaaacccccgtagggggctacatcaaaac

SEQ ID NO: 26229 - DNA, 36 bp, synthetic construct
  misc_feature 1..36: note = Synthetic oligonucleotide
  source 1..36: mol_type = other DNA
gatgtaaaagaacaatacttgaagccaagttacaac

SEQ ID NO: 26230 - DNA, 36 bp, synthetic construct
  misc_feature 1..36: note = Synthetic oligonucleotide
  source 1..36: mol_type = other DNA
gatgtaaaagaactaaagttgaaagcaaatcacaac

SEQ ID NO: 26231 - DNA, 36 bp, synthetic construct
  misc_feature 1..36: note = Synthetic oligonucleotide
  source 1..36: mol_type = other DNA
gatgtcaaagatcgtttgttgaaagcaaatcacaac

SEQ ID NO: 26232 - DNA, 36 bp, synthetic construct
  misc_feature 1..36: note = Synthetic oligonucleotide
  source 1..36: mol_type = other DNA
gatgtctttattcccgttttttcatcaaaccacaac

SEQ ID NO: 26233 - DNA, 26 bp, synthetic construct
  misc_feature 1..26: note = Synthetic oligonucleotide
  source 1..26: mol_type = other DNA
gatgtgaaagaactaagctataacaa

SEQ ID NO: 26234 - DNA, 32 bp, synthetic construct
  misc_feature 1..32: note = Synthetic oligonucleotide
  source 1..32: mol_type = other DNA
gatgtgaaagaactaagttaatatcaaaagtt

SEQ ID NO: 26235 - DNA, 34 bp, synthetic construct
  misc_feature 1..34: note = Synthetic oligonucleotide
  source 1..34: mol_type = other DNA
gatgtgaaagatctaagctacctaaaaatttgaa

SEQ ID NO: 26236 - DNA, 36 bp, synthetic construct
  misc_feature 1..36: note = Synthetic oligonucleotide
  source 1..36: mol_type = other DNA
gatgtttataatactattctggaaacaattcacaac

SEQ ID NO: 26237 - DNA, 33 bp, synthetic construct
  misc_feature 1..33: note = Synthetic oligonucleotide
  source 1..33: mol_type = other DNA
gatgtttatgccagtgcaaaggtactaattttt

SEQ ID NO: 26238 - DNA, 30 bp, synthetic construct
  misc_feature 1..30: note = Synthetic oligonucleotide
  source 1..30: mol_type = other DNA
gatgtttccaatggatcaaagatactaatt

SEQ ID NO: 26239 - DNA, 30 bp, synthetic construct; identical to SEQ ID NO: 26238
  misc_feature 1..30: note = Synthetic oligonucleotide
  source 1..30: mol_type = other DNA

SEQ ID NO: 26240 - DNA, 31 bp, synthetic construct
  misc_feature 1..31: note = Synthetic oligonucleotide
  source 1..31: mol_type = other DNA
gatgtttccaatggatcaaagatactaattt

SEQ ID NO: 26241 - DNA, 31 bp, synthetic construct; identical to SEQ ID NO: 26240
  misc_feature 1..31: note = Synthetic oligonucleotide
  source 1..31: mol_type = other DNA

SEQ ID NO: 26242 - DNA, 31 bp, synthetic construct; identical to SEQ ID NO: 26240
  misc_feature 1..31: note = Synthetic oligonucleotide
  source 1..31: mol_type = other DNA

SEQ ID NO: 26243 - DNA, 32 bp, synthetic construct
  misc_feature 1..32: note = Synthetic oligonucleotide
  source 1..32: mol_type = other DNA
gatgtttctgccactgcaaagatactaatttt

SEQ ID NO: 26244 - DNA, 32 bp, synthetic construct; identical to SEQ ID NO: 26243
  misc_feature 1..32: note = Synthetic oligonucleotide
  source 1..32: mol_type = other DNA

SEQ ID NO: 26245 - DNA, 34 bp, synthetic construct
  misc_feature 1..34: note = Synthetic oligonucleotide
  source 1..34: mol_type = other DNA
gatgtttgttactatgcaaagataagaattttaa

SEQ ID NO: 26246 - DNA, 36 bp, synthetic construct
  misc_feature 1..36: note = Synthetic oligonucleotide
  source 1..36: mol_type = other DNA
gattaagaccactctgaaattacactactctcaaac

SEQ ID NO: 26247 - DNA, 36 bp, synthetic construct; identical to SEQ ID NO: 26246
  misc_feature 1..36: note = Synthetic oligonucleotide
  source 1..36: mol_type = other DNA

SEQ ID NO: 26248 - DNA, 36 bp, synthetic construct; identical to SEQ ID NO: 26246
  misc_feature 1..36: note = Synthetic oligonucleotide
  source 1..36: mol_type = other DNA

SEQ ID NO: 26249 - DNA, 36 bp, synthetic construct; identical to SEQ ID NO: 26246
  misc_feature 1..36: note = Synthetic oligonucleotide
  source 1..36: mol_type = other DNA

SEQ ID NO: 26250 - DNA, 36 bp, synthetic construct
  misc_feature 1..36: note = Synthetic oligonucleotide
  source 1..36: mol_type = other DNA
gattaaggccactttgaaattacactgctctcaaac

SEQ ID NO: 26251 - DNA, 36 bp, synthetic construct
  misc_feature 1..36: note = Synthetic oligonucleotide
  source 1..36: mol_type = other DNA
gattaataatccctaataatttctactgttgtagat

SEQ ID NO: 26252 - DNA, 36 bp, synthetic construct; identical to SEQ ID NO: 11843
  misc_feature 1..36: note = Synthetic oligonucleotide
  source 1..36: mol_type = other DNA

SEQ ID NO: 26253 - DNA, 36 bp, synthetic construct
  misc_feature 1..36: note = Synthetic oligonucleotide
  source 1..36: mol_type = other DNA
gattccaactcctgaagatttcgattaaactgctac

SEQ ID NO: 26254 - DNA, 36 bp, synthetic construct
  misc_feature 1..36: note = Synthetic oligonucleotide
  source 1..36: mol_type = other DNA
gattccaactcctgagaaattagactaaactgcaac

SEQ ID NO: 26255 - DNA, 36 bp, synthetic construct; identical to SEQ ID NO: 11850
  misc_feature 1..36: note = Synthetic oligonucleotide
  source 1..36: mol_type = other DNA

SEQ ID NO: 26256 - DNA, 36 bp, synthetic construct; identical to SEQ ID NO: 11852
  misc_feature 1..36: note = Synthetic oligonucleotide
  source 1..36: mol_type = other DNA

SEQ ID NO: 26257 - DNA, 31 bp, synthetic construct
  misc_feature 1..31: note = Synthetic oligonucleotide
  source 1..31: mol_type = other DNA
gattggcagggactggccgctctgatacact

SEQ ID NO: 26258 - DNA, 37 bp, synthetic construct
  misc_feature 1..37: note = Synthetic oligonucleotide
  source 1..37: mol_type = other DNA
gattgtaacactacgagataagaggggaagctacaac

SEQ ID NO: 26259 - DNA, 38 bp, synthetic construct
  misc_feature 1..38: note = Synthetic oligonucleotide
  source 1..38: mol_type = other DNA
gattgtagcactgtaaggaatttcaaggaagctacaac

SEQ ID NO: 26260 - DNA, 37 bp, synthetic construct; identical to SEQ ID NO: 11857
  misc_feature 1..37: note = Synthetic oligonucleotide
  source 1..37: mol_type = other DNA

SEQ ID NO: 26261 - DNA, 37 bp, synthetic construct; identical to SEQ ID NO: 11858
  misc_feature 1..37: note = Synthetic oligonucleotide
  source 1..37: mol_type = other DNA

SEQ ID NO: 26262 - DNA, 37 bp, synthetic construct; identical to SEQ ID NO: 11858
  misc_feature 1..37: note = Synthetic oligonucleotide
  source 1..37: mol_type = other DNA

SEQ ID NO: 26263 - DNA, 37 bp, synthetic construct; identical to SEQ ID NO: 11858
  misc_feature 1..37: note = Synthetic oligonucleotide
  source 1..37: mol_type = other DNA

SEQ ID NO: 26264 - DNA, 30 bp, synthetic construct
  misc_feature 1..30: note = Synthetic oligonucleotide
  source 1..30: mol_type = other DNA
gattgtagctttccggggtgagagagggag

SEQ ID NO: 26265 - DNA, 37 bp, synthetic construct; identical to SEQ ID NO: 11861
  misc_feature 1..37: note = Synthetic oligonucleotide
  source 1..37: mol_type = other DNA

SEQ ID NO: 26266 - DNA, 37 bp, synthetic construct
  misc_feature 1..37: note = Synthetic oligonucleotide
  source 1..37: mol_type = other DNA
gattgtatcacgtactagtttgtaggggtattaaaac

SEQ ID NO: 26267 - DNA, 30 bp, synthetic construct
  misc_feature 1..30: note = Synthetic oligonucleotide
  source 1..30: mol_type = other DNA
gatttaataggaacataatgggatgtaaag

SEQ ID NO: 26268 - DNA, 36 bp, synthetic construct
  misc_feature 1..36: note = Synthetic oligonucleotide
  source 1..36: mol_type = other DNA
gatttagcacagaaggatttggaggggaaccacggc

SEQ ID NO: 26269 - DNA, 36 bp, synthetic construct
  misc_feature 1..36: note = Synthetic oligonucleotide
  source 1..36: mol_type = other DNA
gatttggtaccattctaaacaacatgactctaaaac

SEQ ID NO: 26270 - DNA, 36 bp, synthetic construct
  misc_feature 1..36: note = Synthetic oligonucleotide
  source 1..36: mol_type = other DNA
gattttaagtatggttctttttactaagttactgac

SEQ ID NO: 26271 - DNA, 36 bp, synthetic construct; identical to SEQ ID NO: 26270
  misc_feature 1..36: note = Synthetic oligonucleotide
  source 1..36: mol_type = other DNA

SEQ ID NO: 26272 - DNA, 36 bp, synthetic construct; identical to SEQ ID NO: 26270
  misc_feature 1..36: note = Synthetic oligonucleotide
  source 1..36: mol_type = other DNA

SEQ ID NO: 26273 - DNA, 36 bp, synthetic construct; identical to SEQ ID NO: 26270
  misc_feature 1..36: note = Synthetic oligonucleotide
  source 1..36: mol_type = other DNA

SEQ ID NO: 26274 - DNA, 36 bp, synthetic construct
  misc_feature 1..36: note = Synthetic oligonucleotide
  source 1..36: mol_type = other DNA
gattttatcagttaggaaatgaacttagaccagaac

SEQ ID NO: 26275 - DNA, 35 bp, synthetic construct
  misc_feature 1..35: note = Synthetic oligonucleotide
  source 1..35: mol_type = other DNA
gcaatataacactttttctgtaaccctaccaaaac

SEQ ID NO: 26276 - DNA, 20 bp, synthetic construct
  misc_feature 1..20: note = Synthetic oligonucleotide
  source 1..20: mol_type = other DNA
gcaattttttcaccttttca

SEQ ID NO: 26277 - DNA, 23 bp, synthetic construct
  misc_feature 1..23: note = Synthetic oligonucleotide
  source 1..23: mol_type = other DNA
gcagcatctttagcgtcagaaac

SEQ ID NO: 26278 - DNA, 36 bp, synthetic construct
  misc_feature 1..36: note = Synthetic oligonucleotide
  source 1..36: mol_type = other DNA
gcagcggcttgcggtcttctctcgttttgctacact

SEQ ID NO: 26279 - DNA, 22 bp, synthetic construct
  misc_feature 1..22: note = Synthetic oligonucleotide
  source 1..22: mol_type = other DNA
gcaggatgatttatggtagact

SEQ ID NO: 26280 - DNA, 38 bp, synthetic construct
  misc_feature 1..38: note = Synthetic oligonucleotide
  source 1..38: mol_type = other DNA
gcaggtgcaaaggtactaattttttagcaaatcacaac

SEQ ID NO: 26281 - DNA, 22 bp, synthetic construct
  misc_feature 1..22: note = Synthetic oligonucleotide
  source 1..22: mol_type = other DNA
gcagttctttagggtaataacc

SEQ ID NO: 26282 - DNA, 36 bp, synthetic construct
  misc_feature 1..36: note = Synthetic oligonucleotide
  source 1..36: mol_type = other DNA
gcataagttagtaatcaaataacacatctctcaaac

SEQ ID NO: 26283 - DNA, 36 bp, synthetic construct
  misc_feature 1..36: note = Synthetic oligonucleotide
  source 1..36: mol_type = other DNA
gccatacattactaaaaattaacagggtcctgtaac

SEQ ID NO: 26284 - DNA, 36 bp, synthetic construct
  misc_feature 1..36: note = Synthetic oligonucleotide
  source 1..36: mol_type = other DNA
gccatagcttcccatccgacacggttatgctatact

SEQ ID NO: 26285 - DNA, 36 bp, synthetic construct
  misc_feature 1..36: note = Synthetic oligonucleotide
  source 1..36: mol_type = other DNA
gccatagcttccctttttgcatcgctgtgctatggt

SEQ ID NO: 26286 - DNA, 25 bp, synthetic construct
  misc_feature 1..25: note = Synthetic oligonucleotide
  source 1..25: mol_type = other DNA
gcccgaagcgcggtacctgtgaagc

SEQ ID NO: 26287 - DNA, 36 bp, synthetic construct
  misc_feature 1..36: note = Synthetic oligonucleotide
  source 1..36: mol_type = other DNA
gccctagcggagtgccattcattgagatgctagaat

SEQ ID NO: 26288 - DNA, 36 bp, synthetic construct
  misc_feature 1..36: note = Synthetic oligonucleotide
  source 1..36: mol_type = other DNA
gccctagcggagtgccgttcattgaggtgctagaat

SEQ ID NO: 26289 - DNA, 36 bp, synthetic construct; identical to SEQ ID NO: 11877
  misc_feature 1..36: note = Synthetic oligonucleotide
  source 1..36: mol_type = other DNA

SEQ ID NO: 26290 - DNA, 36 bp, synthetic construct; identical to SEQ ID NO: 11877
  misc_feature 1..36: note = Synthetic oligonucleotide
  source 1..36: mol_type = other DNA

SEQ ID NO: 26291 - DNA, 36 bp, synthetic construct; identical to SEQ ID NO: 11877
  misc_feature 1..36: note = Synthetic oligonucleotide
  source 1..36: mol_type = other DNA

SEQ ID NO: 26292 - DNA, 26 bp, synthetic construct
  misc_feature 1..26: note = Synthetic oligonucleotide
  source 1..26: mol_type = other DNA
gccggcaatcgtctcctgagtacact

SEQ ID NO: 26293 - DNA, 36 bp, synthetic construct
  misc_feature 1..36: note = Synthetic oligonucleotide
  source 1..36: mol_type = other DNA
gccgtggcttccctaccgatttcccagtggtaggct

SEQ ID NO: 26294 - DNA, 36 bp, synthetic construct; identical to SEQ ID NO: 11880
  misc_feature 1..36: note = Synthetic oligonucleotide
  source 1..36: mol_type = other DNA

SEQ ID NO: 26295 - DNA, 36 bp, synthetic construct; identical to SEQ ID NO: 11880
  misc_feature 1..36: note = Synthetic oligonucleotide
  source 1..36: mol_type = other DNA

SEQ ID NO: 26296 - DNA, 36 bp, synthetic construct; identical to SEQ ID NO: 11880
  misc_feature 1..36: note = Synthetic oligonucleotide
  source 1..36: mol_type = other DNA

SEQ ID NO: 26297 - DNA, 36 bp, synthetic construct; identical to SEQ ID NO: 11880
  misc_feature 1..36: note = Synthetic oligonucleotide
  source 1..36: mol_type = other DNA

SEQ ID NO: 26298 - DNA, 36 bp, synthetic construct; identical to SEQ ID NO: 11880
  misc_feature 1..36: note = Synthetic oligonucleotide
  source 1..36: mol_type = other DNA

SEQ ID NO: 26299 - DNA, 36 bp, synthetic construct; identical to SEQ ID NO: 11880
  misc_feature 1..36: note = Synthetic oligonucleotide
  source 1..36: mol_type = other DNA

SEQ ID NO: 26300 - DNA, 36 bp, synthetic construct; identical to SEQ ID NO: 11880
  misc_feature 1..36: note = Synthetic oligonucleotide
  source 1..36: mol_type = other DNA

SEQ ID NO: 26301 - DNA, 36 bp, synthetic construct; identical to SEQ ID NO: 11880
  misc_feature 1..36: note = Synthetic oligonucleotide
  source 1..36: mol_type = other DNA

SEQ ID NO: 26302 - DNA, 36 bp, synthetic construct; identical to SEQ ID NO: 11880
  misc_feature 1..36: note = Synthetic oligonucleotide
  source 1..36: mol_type = other DNA

SEQ ID NO: 26303 - DNA, 36 bp, synthetic construct
  misc_feature 1..36: note = Synthetic oligonucleotide
  source 1..36: mol_type = other DNA
gccgtggcttccctaccgatttccccgtggtaggtt

SEQ ID NO: 26304 - DNA, 36 bp, synthetic construct; identical to SEQ ID NO: 26303
  misc_feature 1..36: note = Synthetic oligonucleotide
  source 1..36: mol_type = other DNA

SEQ ID NO: 26305 - DNA, 36 bp, synthetic construct; identical to SEQ ID NO: 26303
  misc_feature 1..36: note = Synthetic oligonucleotide
  source 1..36: mol_type = other DNA

SEQ ID NO: 26306 - DNA, 36 bp, synthetic construct; identical to SEQ ID NO: 26303
  misc_feature 1..36: note = Synthetic oligonucleotide
  source 1..36: mol_type = other DNA

SEQ ID NO: 26307 - DNA, 36 bp, synthetic construct; identical to SEQ ID NO: 11881
  misc_feature 1..36: note = Synthetic oligonucleotide
  source 1..36: mol_type = other DNA

SEQ ID NO: 26308 - DNA, 36 bp, synthetic construct; identical to SEQ ID NO: 11881
  misc_feature 1..36: note = Synthetic oligonucleotide
  source 1..36: mol_type = other DNA

SEQ ID NO: 26309 - DNA, 36 bp, synthetic construct; identical to SEQ ID NO: 11881
  misc_feature 1..36: note = Synthetic oligonucleotide
  source 1..36: mol_type = other DNA

SEQ ID NO: 26310 - DNA, 36 bp, synthetic construct
  misc_feature 1..36: note = Synthetic oligonucleotide
  source 1..36: mol_type = other DNA
gccgtggtctgaccggagaggccgctcgattacact

SEQ ID NO: 26311 - DNA, 36 bp, synthetic construct
  misc_feature 1..36: note = Synthetic oligonucleotide
  source 1..36: mol_type = other DNA
gccgtggtctgcggggagaggccgctcgattacact

SEQ ID NO: 26312 - DNA, 36 bp, synthetic construct
  misc_feature 1..36: note = Synthetic oligonucleotide
  source 1..36: mol_type = other DNA
gccgtggttcccccccggctttccccctgctaagct

SEQ ID NO: 26313 - DNA, 36 bp, synthetic construct
  misc_feature 1..36: note = Synthetic oligonucleotide
  source 1..36: mol_type = other DNA
gccgtggttcccccccggctttcctcctgctaagct

SEQ ID NO: 26314 - DNA, 36 bp, synthetic construct
  misc_feature 1..36: note = Synthetic oligonucleotide
  source 1..36: mol_type = other DNA
gccgtggttcccctccaaatccttctgtgctaaatc

SEQ ID NO: 26315 - DNA, 36 bp, synthetic construct; identical to SEQ ID NO: 26314
  misc_feature 1..36: note = Synthetic oligonucleotide
  source 1..36: mol_type = other DNA

SEQ ID NO: 26316 - DNA, 36 bp, synthetic construct
  misc_feature 1..36: note = Synthetic oligonucleotide
  source 1..36: mol_type = other DNA
gccgtggttccgccggaagcgtcgctctgatacact

SEQ ID NO: 26317 - DNA, 36 bp, synthetic construct
  misc_feature 1..36: note = Synthetic oligonucleotide
  source 1..36: mol_type = other DNA
gccgtggttcggcctgaaacgccgctcgaatacact

SEQ ID NO: 26318 - DNA, 36 bp, synthetic construct
  misc_feature 1..36: note = Synthetic oligonucleotide
  source 1..36: mol_type = other DNA
gccgtggttgcactcctgatttccccggagtaacct

SEQ ID NO: 26319 - DNA, 36 bp, synthetic construct
  misc_feature 1..36: note = Synthetic oligonucleotide
  source 1..36: mol_type = other DNA
gccgtggttgccctcctgattcgaatgggctaatct

SEQ ID NO: 26320 - DNA, 36 bp, synthetic construct
  misc_feature 1..36: note = Synthetic oligonucleotide
  source 1..36: mol_type = other DNA
gccgtggttgccctcctgatttcaacgtgctagggt

SEQ ID NO: 26321 - DNA, 36 bp, synthetic construct
  misc_feature 1..36: note = Synthetic oligonucleotide
  source 1..36: mol_type = other DNA
gccgtggttgccctcctgatttcaatctgataggct

SEQ ID NO: 26322 - DNA, 36 bp, synthetic construct
  misc_feature 1..36: note = Synthetic oligonucleotide
  source 1..36: mol_type = other DNA
gccgtggttgccctcctgatttcaatgcgctagggt

SEQ ID NO: 26323 - DNA, 36 bp, synthetic construct
  misc_feature 1..36: note = Synthetic oligonucleotide
  source 1..36: mol_type = other DNA
gccgtggttgccctcctgatttcaatgtgataggct

SEQ ID NO: 26324 - DNA, 36 bp, synthetic construct; identical to SEQ ID NO: 26323
  misc_feature 1..36: note = Synthetic oligonucleotide
  source 1..36: mol_type = other DNA

SEQ ID NO: 26325 - DNA, 36 bp, synthetic construct; identical to SEQ ID NO: 26323
  misc_feature 1..36: note = Synthetic oligonucleotide
  source 1..36: mol_type = other DNA

SEQ ID NO: 26326 - DNA, 36 bp, synthetic construct
  misc_feature 1..36: note = Synthetic oligonucleotide
  source 1..36: mol_type = other DNA
gccgtggttgggccggaaccgtcgcttggatacact

SEQ ID NO: 26327 - DNA, 36 bp, synthetic construct; identical to SEQ ID NO: 11887
  misc_feature 1..36: note = Synthetic oligonucleotide
  source 1..36: mol_type = other DNA

SEQ ID NO: 26328 - DNA, 36 bp, synthetic construct; identical to SEQ ID NO: 11887
  misc_feature 1..36: note = Synthetic oligonucleotide
  source 1..36: mol_type = other DNA

SEQ ID NO: 26329 - DNA, 36 bp, synthetic construct; identical to SEQ ID NO: 11890
  misc_feature 1..36: note = Synthetic oligonucleotide
  source 1..36: mol_type = other DNA

SEQ ID NO: 26330 - DNA, 36 bp, synthetic construct
  misc_feature 1..36: note = Synthetic oligonucleotide
  source 1..36: mol_type = other DNA
gccgtggtttccctaccgactcccatcgtgtaggct

SEQ ID NO: 26331 - DNA, 36 bp, synthetic construct; identical to SEQ ID NO: 26330
  misc_feature 1..36: note = Synthetic oligonucleotide
  source 1..36: mol_type = other DNA

SEQ ID NO: 26332 - DNA, 36 bp, synthetic construct
  misc_feature 1..36: note = Synthetic oligonucleotide
  source 1..36: mol_type = other DNA
gccgtggtttccctaccgactcccatcgtgtaggtt

SEQ ID NO: 26333 - DNA, 36 bp, synthetic construct
  misc_feature 1..36: note = Synthetic oligonucleotide
  source 1..36: mol_type = other DNA
gccgtggtttccctaccgactccccgatggtaggct

SEQ ID NO: 26334 - DNA, 36 bp, synthetic construct; identical to SEQ ID NO: 11894
  misc_feature 1..36: note = Synthetic oligonucleotide
  source 1..36: mol_type = other DNA

SEQ ID NO: 26335 - DNA, 37 bp, synthetic construct; identical to SEQ ID NO: 11895
  misc_feature 1..37: note = Synthetic oligonucleotide
  source 1..37: mol_type = other DNA

SEQ ID NO: 26336 - DNA, 36 bp, synthetic construct
  misc_feature 1..36: note = Synthetic oligonucleotide
  source 1..36: mol_type = other DNA
gccgtggtttccctaccgacttcctgctggtaggct

SEQ ID NO: 26337 - DNA, 36 bp, synthetic construct
  misc_feature 1..36: note = Synthetic oligonucleotide
  source 1..36: mol_type = other DNA
gccgtggtttccctaccgacttgcccctggtaggat

SEQ ID NO: 26338 - DNA, 36 bp, synthetic construct
  misc_feature 1..36: note = Synthetic oligonucleotide
  source 1..36: mol_type = other DNA
gccgtggtttccctaccgacttgccgatggtaggac

SEQ ID NO: 26339 - DNA, 36 bp, synthetic construct
  misc_feature 1..36: note = Synthetic oligonucleotide
  source 1..36: mol_type = other DNA
gccgtggtttccctaccgatcttcctatggtaggct

SEQ ID NO: 26340 - DNA, 36 bp, synthetic construct
  misc_feature 1..36: note = Synthetic oligonucleotide
  source 1..36: mol_type = other DNA
gccgtggtttccctaccgatcttcctgtggtaggct

SEQ ID NO: 26341 - DNA, 36 bp, synthetic construct; identical to SEQ ID NO: 26340
  misc_feature 1..36: note = Synthetic oligonucleotide
  source 1..36: mol_type = other DNA

SEQ ID NO: 26342 - DNA, 36 bp, synthetic construct
  misc_feature 1..36: note = Synthetic oligonucleotide
  source 1..36: mol_type = other DNA
gccgtggtttccctaccgattcccctgaggtaggct

SEQ ID NO: 26343 - DNA, 36 bp, synthetic construct
  misc_feature 1..36: note = Synthetic oligonucleotide
  source 1..36: mol_type = other DNA
gccgtggtttccctaccgatttccccgtggtaggct

SEQ ID NO: 26344 - DNA, 36 bp, synthetic construct; identical to SEQ ID NO: 11899
  misc_feature 1..36: note = Synthetic oligonucleotide
  source 1..36: mol_type = other DNA

SEQ ID NO: 26345 - DNA, 36 bp, synthetic construct; identical to SEQ ID NO: 11900
  misc_feature 1..36: note = Synthetic oligonucleotide
  source 1..36: mol_type = other DNA

SEQ ID NO: 26346 - DNA, 36 bp, synthetic construct
  misc_feature 1..36: note = Synthetic oligonucleotide
  source 1..36: mol_type = other DNA
gccgtggtttccctaccgatttcccttgggtaggct

SEQ ID NO: 26347 - DNA, 37 bp, synthetic construct
  misc_feature 1..37: note = Synthetic oligonucleotide
  source 1..37: mol_type = other DNA
gccgtggtttccctaccgatttgccaatggtaggact

SEQ ID NO: 26348 - DNA, 36 bp, synthetic construct
  misc_feature 1..36: note = Synthetic oligonucleotide
  source 1..36: mol_type = other DNA
gccgtggtttccctaccgatttgccagtggtaggac

SEQ ID NO: 26349 - DNA, 36 bp, synthetic construct; identical to SEQ ID NO: 26348
  misc_feature 1..36: note = Synthetic oligonucleotide
  source 1..36: mol_type = other DNA

SEQ ID NO: 26350 - DNA, 36 bp, synthetic construct; identical to SEQ ID NO: 11902
  misc_feature 1..36: note = Synthetic oligonucleotide
  source 1..36: mol_type = other DNA

SEQ ID NO: 26351 - DNA, 36 bp, synthetic construct; identical to SEQ ID NO: 11902
  misc_feature 1..36: note = Synthetic oligonucleotide
  source 1..36: mol_type = other DNA

SEQ ID NO: 26352 - DNA, 36 bp, synthetic construct; identical to SEQ ID NO: 11902
  misc_feature 1..36: note = Synthetic oligonucleotide
  source 1..36: mol_type = other DNA

SEQ ID NO: 26353 - DNA, 36 bp, synthetic construct; identical to SEQ ID NO: 11902
  misc_feature 1..36: note = Synthetic oligonucleotide
  source 1..36: mol_type = other DNA

SEQ ID NO: 26354 - DNA, 36 bp, synthetic construct; identical to SEQ ID NO: 11902
  misc_feature 1..36: note = Synthetic oligonucleotide
  source 1..36: mol_type = other DNA

SEQ ID NO: 26355 - DNA, 36 bp, synthetic construct
  misc_feature 1..36: note = Synthetic oligonucleotide
  source 1..36: mol_type = other DNA
gccgtggtttccctaccgatttgccgatggtaggac

SEQ ID NO: 26356 - DNA, 36 bp, synthetic construct
  misc_feature 1..36: note = Synthetic oligonucleotide
  source 1..36: mol_type = other DNA
gccgtggtttccctaccgatttgcctatggtaggat

SEQ ID NO: 26357 - DNA, 36 bp, synthetic construct
  misc_feature 1..36: note = Synthetic oligonucleotide
  source 1..36: mol_type = other DNA
gccgtggtttccctaccgatttgcctgtggtaggac

SEQ ID NO: 26358 - DNA, 36 bp, synthetic construct
  misc_feature 1..36: note = Synthetic oligonucleotide
  source 1..36: mol_type = other DNA
gccgtggtttccctaccgattttcctatggtagaat

SEQ ID NO: 26359 - DNA, 36 bp, synthetic construct
  misc_feature 1..36: note = Synthetic oligonucleotide
  source 1..36: mol_type = other DNA
gccgtggtttccctgccgactcccatcgtgtaggct

SEQ ID NO: 26360 - DNA, 36 bp, synthetic construct; identical to SEQ ID NO: 11907
  misc_feature 1..36: note = Synthetic oligonucleotide
  source 1..36: mol_type = other DNA

SEQ ID NO: 26361 - DNA, 36 bp, synthetic construct
  misc_feature 1..36: note = Synthetic oligonucleotide
  source 1..36: mol_type = other DNA
gccgtggtttgccgcgaagggccgttctagtacact

SEQ ID NO: 26362 - DNA, 36 bp, synthetic construct
  misc_feature 1..36: note = Synthetic oligonucleotide
  source 1..36: mol_type = other DNA
gccgtggtttggccgcacgcgtcgctcaggtacact

SEQ ID NO: 26363 - DNA, 36 bp, synthetic construct
  misc_feature 1..36: note = Synthetic oligonucleotide
  source 1..36: mol_type = other DNA
gccgtggtttggccggaagcgtcgctctgatacact

SEQ ID NO: 26364 - DNA, 36 bp, synthetic construct
  misc_feature 1..36: note = Synthetic oligonucleotide
  source 1..36: mol_type = other DNA
gccgtggtttggcgggaagcgtcgctctgatacact

SEQ ID NO: 26365 - DNA, 36 bp, synthetic construct
  misc_feature 1..36: note = Synthetic oligonucleotide
  source 1..36: mol_type = other DNA
gcctactacctctttagaactacactactctcaaac

SEQ ID NO: 26366 - DNA, 31 bp, synthetic construct; identical to SEQ ID NO: 11913
  misc_feature 1..31: note = Synthetic oligonucleotide
  source 1..31: mol_type = other DNA

SEQ ID NO: 26367 - DNA, 28 bp, synthetic construct
  misc_feature 1..28: note = Synthetic oligonucleotide
  source 1..28: mol_type = other DNA
gcctttgttatgggcggggttctacaat

SEQ ID NO: 26368 - DNA, 36 bp, synthetic construct; identical to SEQ ID NO: 11920
  misc_feature 1..36: note = Synthetic oligonucleotide
  source 1..36: mol_type = other DNA

SEQ ID NO: 26369 - DNA, 36 bp, synthetic construct
  misc_feature 1..36: note = Synthetic oligonucleotide
  source 1..36: mol_type = other DNA
gctaggaatcaatcacccatcccctttgatatactg

SEQ ID NO: 26370 - DNA, 36 bp, synthetic construct; identical to SEQ ID NO: 11922
  misc_feature 1..36: note = Synthetic oligonucleotide
  source 1..36: mol_type = other DNA

SEQ ID NO: 26371 - DNA, 36 bp, synthetic construct; identical to SEQ ID NO: 11922
  misc_feature 1..36: note = Synthetic oligonucleotide
  source 1..36: mol_type = other DNA

SEQ ID NO: 26372 - DNA, 36 bp, synthetic construct; identical to SEQ ID NO: 11922
  misc_feature 1..36: note = Synthetic oligonucleotide
  source 1..36: mol_type = other DNA

SEQ ID NO: 26373 - DNA, 36 bp, synthetic construct; identical to SEQ ID NO: 11922
  misc_feature 1..36: note = Synthetic oligonucleotide
  source 1..36: mol_type = other DNA

SEQ ID NO: 26374 - DNA, 36 bp, synthetic construct; identical to SEQ ID NO: 11922
  misc_feature 1..36: note = Synthetic oligonucleotide
  source 1..36: mol_type = other DNA

SEQ ID NO: 26375 - DNA, 36 bp, synthetic construct; identical to SEQ ID NO: 11922
  misc_feature 1..36: note = Synthetic oligonucleotide
  source 1..36: mol_type = other DNA

SEQ ID NO: 26376 - DNA, 36 bp, synthetic construct; identical to SEQ ID NO: 11922
  misc_feature 1..36: note = Synthetic oligonucleotide
  source 1..36: mol_type = other DNA

SEQ ID NO: 26377 - DNA, 36 bp, synthetic construct; identical to SEQ ID NO: 11922
  misc_feature 1..36: note = Synthetic oligonucleotide
  source 1..36: mol_type = other DNA

SEQ ID NO: 26378 - DNA, 36 bp, synthetic construct; identical to SEQ ID NO: 11922
  misc_feature 1..36: note = Synthetic oligonucleotide
  source 1..36: mol_type = other DNA

SEQ ID NO: 26379 - DNA, 36 bp, synthetic construct; identical to SEQ ID NO: 11923
  misc_feature 1..36: note = Synthetic oligonucleotide
  source 1..36: mol_type = other DNA

SEQ ID NO: 26380 - DNA, 36 bp, synthetic construct
  misc_feature 1..36: note = Synthetic oligonucleotide
  source 1..36: mol_type = other DNA
gctagggtttggccggaaccgctcctgagatacact

SEQ ID NO: 26381 - DNA, 19 bp, synthetic construct
  misc_feature 1..19: note = Synthetic oligonucleotide
  source 1..19: mol_type = other DNA
gctataactccaaagaaaa

SEQ ID NO: 26382 - DNA, 36 bp, synthetic construct
  misc_feature 1..36: note = Synthetic oligonucleotide
  source 1..36: mol_type = other DNA
gctatagcttgacgtgaatatcgactctggtacagt

SEQ ID NO: 26383 - DNA, 36 bp, synthetic construct
  misc_feature 1..36: note = Synthetic oligonucleotide
  source 1..36: mol_type = other DNA
gctatagttccctattatttcttggtatggtataat

SEQ ID NO: 26384 - DNA, 36 bp, synthetic construct
  misc_feature 1..36: note = Synthetic oligonucleotide
  source 1..36: mol_type = other DNA
gctatagtttcccttcgaaagtatttattgtataat

SEQ ID NO: 26385 - DNA, 36 bp, synthetic construct
  misc_feature 1..36: note = Synthetic oligonucleotide
  source 1..36: mol_type = other DNA
gctatagtttccttacaaaatcggctaaaataaaac

SEQ ID NO: 26386 - DNA, 36 bp, synthetic construct
  misc_feature 1..36: note = Synthetic oligonucleotide
  source 1..36: mol_type = other DNA
gctatcggtccctctattttcttggtatggtataat

SEQ ID NO: 26387 - DNA, 36 bp, synthetic construct
  misc_feature 1..36: note = Synthetic oligonucleotide
  source 1..36: mol_type = other DNA
gctatggtttgccgggaaccgctgctgagatacact

SEQ ID NO: 26388 - DNA, 36 bp, synthetic construct; identical to SEQ ID NO: 11933
  misc_feature 1..36: note = Synthetic oligonucleotide
  source 1..36: mol_type = other DNA

SEQ ID NO: 26389 - DNA, 36 bp, synthetic construct
  misc_feature 1..36: note = Synthetic oligonucleotide
  source 1..36: mol_type = other DNA
gctatggtttgccgggaacggccgctgagatacact

SEQ ID NO: 26390 - DNA, 36 bp, synthetic construct
  misc_feature 1..36: note = Synthetic oligonucleotide
  source 1..36: mol_type = other DNA
gctatggtttgccgggaagcgccgctgagatacact

SEQ ID NO: 26391 - DNA, 36 bp, synthetic construct; identical to SEQ ID NO: 11934
  misc_feature 1..36: note = Synthetic oligonucleotide
  source 1..36: mol_type = other DNA

SEQ ID NO: 26392 - DNA, 36 bp, synthetic construct; identical to SEQ ID NO: 11934
  misc_feature 1..36: note = Synthetic oligonucleotide
  source 1..36: mol_type = other DNA

SEQ ID NO: 26393 - DNA, 36 bp, synthetic construct
  misc_feature 1..36: note = Synthetic oligonucleotide
  source 1..36: mol_type = other DNA
gctatggtttgccgggaatcgcttctgaggtacact

SEQ ID NO: 26394 - DNA, 36 bp, synthetic construct
  misc_feature 1..36: note = Synthetic oligonucleotide
  source 1..36: mol_type = other DNA
gctatgttttgaaggaaatgctcgctctgctataat

SEQ ID NO: 26395 - DNA, 36 bp, synthetic construct
  misc_feature 1..36: note = Synthetic oligonucleotide
  source 1..36: mol_type = other DNA
gctccggtttggcctcgcggctatctctgctaagac

SEQ ID NO: 26396 - DNA, 25 bp, synthetic construct
  misc_feature 1..25: note = Synthetic oligonucleotide
  source 1..25: mol_type = other DNA
gctcgaaacgccatgcccacgaagc

SEQ ID NO: 26397 - DNA, 25 bp, synthetic construct
  misc_feature 1..25: note = Synthetic oligonucleotide
  source 1..25: mol_type = other DNA
gctcgaatcgcggtccctgcgaagc

SEQ ID NO: 26398 - DNA, 36 bp, synthetic construct; identical to SEQ ID NO: 11938
  misc_feature 1..36: note = Synthetic oligonucleotide
  source 1..36: mol_type = other DNA

SEQ ID NO: 26399 - DNA, 36 bp, synthetic construct; identical to SEQ ID NO: 11938
  misc_feature 1..36: note = Synthetic oligonucleotide
  source 1..36: mol_type = other DNA

SEQ ID NO: 26400 - DNA, 36 bp, synthetic construct; identical to SEQ ID NO: 11938
  misc_feature 1..36: note = Synthetic oligonucleotide
  source 1..36: mol_type = other DNA

SEQ ID NO: 26401 - DNA, 36 bp, synthetic construct; identical to SEQ ID NO: 11938
  misc_feature 1..36: note = Synthetic oligonucleotide
  source 1..36: mol_type = other DNA

SEQ ID NO: 26402 - DNA, 36 bp, synthetic construct
  misc_feature 1..36: note = Synthetic oligonucleotide
  source 1..36: mol_type = other DNA
gctgaatatcctttgaaaattacatcaaaccacaac

SEQ ID NO: 26403 - DNA, 36 bp, synthetic construct
  misc_feature 1..36: note = Synthetic oligonucleotide
  source 1..36: mol_type = other DNA
gctgaatattgattgctttataggatgagatacaac

SEQ ID NO: 26404 - DNA, 36 bp, synthetic construct
  misc_feature 1..36: note = Synthetic oligonucleotide
  source 1..36: mol_type = other DNA
gctgagaatcaatcacccatcccctttgatatactg

SEQ ID NO: 26405 - DNA, 36 bp, synthetic construct
  misc_feature 1..36: note = Synthetic oligonucleotide
  source 1..36: mol_type = other DNA
gctgagaattgatcacccatcccctttgatatactg

SEQ ID NO: 26406 - DNA, 36 bp, synthetic construct
  misc_feature 1..36: note = Synthetic oligonucleotide
  source 1..36: mol_type = other DNA
gctgaggcttgcggtcgcctctcgttttgctacaac

SEQ ID NO: 26407 - DNA, 36 bp, synthetic construct
  misc_feature 1..36: note = Synthetic oligonucleotide
  source 1..36: mol_type = other DNA
gctgaggcttgcggtcgcttctcgttttgctacaac

SEQ ID NO: 26408 - DNA, 36 bp, synthetic construct
  misc_feature 1..36: note = Synthetic oligonucleotide
  source 1..36: mol_type = other DNA
gctgagggtcaattctcgttaaccctgatatacttg

SEQ ID NO: 26409 - DNA, 36 bp, synthetic construct; identical to SEQ ID NO: 26408
  misc_feature 1..36: note = Synthetic oligonucleotide
  source 1..36: mol_type = other DNA

SEQ ID NO: 26410 - DNA, 36 bp, synthetic construct
  misc_feature 1..36: note = Synthetic oligonucleotide
  source 1..36: mol_type = other DNA
gctgaggtttacagggagtcgtcgctttgatacact

SEQ ID NO: 26411 - DNA, 36 bp, synthetic construct
  misc_feature 1..36: note = Synthetic oligonucleotide
  source 1..36: mol_type = other DNA
gctgccgctggccttcgatttctgaactgctaggct

SEQ ID NO: 26412 - DNA, 36 bp, synthetic construct
  misc_feature 1..36: note = Synthetic oligonucleotide
  source 1..36: mol_type = other DNA
gctgcggattgacagcaggcagtgatcaattaccat

SEQ ID NO: 26413 - DNA, 36 bp, synthetic construct
  misc_feature 1..36: note = Synthetic oligonucleotide
  source 1..36: mol_type = other DNA
gctgcggattgacagcaggcagtgatcagttaccat

SEQ ID NO: 26414 - DNA, 36 bp, synthetic construct; identical to SEQ ID NO: 11947
  misc_feature 1..36: note = Synthetic oligonucleotide
  source 1..36: mol_type = other DNA

SEQ ID NO: 26415 - DNA, 36 bp, synthetic construct
  misc_feature 1..36: note = Synthetic oligonucleotide
  source 1..36: mol_type = other DNA
gctgcggattgactgcaggcagtgatcagttactat

SEQ ID NO: 26416 - DNA, 36 bp, synthetic construct; identical to SEQ ID NO: 11951
  misc_feature 1..36: note = Synthetic oligonucleotide
  source 1..36: mol_type = other DNA

SEQ ID NO: 26417 - DNA, 36 bp, synthetic construct; identical to SEQ ID NO: 11951
  misc_feature 1..36: note = Synthetic oligonucleotide
  source 1..36: mol_type = other DNA

SEQ ID NO: 26418 - DNA, 37 bp, synthetic construct
  misc_feature 1..37: note = Synthetic oligonucleotide
  source 1..37: mol_type = other DNA
gctgcggattgcgcccgtctctcgtttcgctacaata

SEQ ID NO: 26419 - DNA, 36 bp, synthetic construct
  misc_feature 1..36: note = Synthetic oligonucleotide
  source 1..36: mol_type = other DNA
gctgcggattgcggccatctctcggtttgctacact

SEQ ID NO: 26420 - DNA, 36 bp, synthetic construct
  misc_feature 1..36: note = Synthetic oligonucleotide
  source 1..36: mol_type = other DNA
gctgcggattgcggccccttctcgttctgctaaaac

SEQ ID NO: 26421 - DNA, 36 bp, synthetic construct
  misc_feature 1..36: note = Synthetic oligonucleotide
  source 1..36: mol_type = other DNA
gctgcggattgcggccctctctcgatttgctacact

SEQ ID NO: 26422 - DNA, 36 bp, synthetic construct
  misc_feature 1..36: note = Synthetic oligonucleotide
  source 1..36: mol_type = other DNA
gctgcggattgcggccgcctctcgtttcgctacact

SEQ ID NO: 26423 - DNA, 36 bp, synthetic construct
  misc_feature 1..36: note = Synthetic oligonucleotide
  source 1..36: mol_type = other DNA
gctgcggattgcggccgtccctcgatttgctacact

SEQ ID NO: 26424 - DNA, 36 bp, synthetic construct; identical to SEQ ID NO: 26423
  misc_feature 1..36: note = Synthetic oligonucleotide
  source 1..36: mol_type = other DNA

SEQ ID NO: 26425 - DNA, 36 bp, synthetic construct
  misc_feature 1..36: note = Synthetic oligonucleotide
  source 1..36: mol_type = other DNA
gctgcggattgcggccgtctcccggtttgctacact

SEQ ID NO: 26426 - DNA, 36 bp, synthetic construct
  misc_feature 1..36: note = Synthetic oligonucleotide
  source 1..36: mol_type = other DNA
gctgcggattgcggccgtctctcgatttgctacgct

SEQ ID NO: 26427 - DNA, 36 bp, synthetic construct; identical to SEQ ID NO: 11955
  misc_feature 1..36: note = Synthetic oligonucleotide
  source 1..36: mol_type = other DNA

SEQ ID NO: 26428 - DNA, 36 bp, synthetic construct
  misc_feature 1..36: note = Synthetic oligonucleotide
  source 1..36: mol_type = other DNA
gctgcggattgcggccgtctctcgttttgctacacc

SEQ ID NO: 26429 - DNA, 36 bp, synthetic construct; identical to SEQ ID NO: 11956
  misc_feature 1..36: note = Synthetic oligonucleotide
  source 1..36: mol_type = other DNA

SEQ ID NO: 26430 - DNA, 36 bp, synthetic construct; identical to SEQ ID NO: 11956
  misc_feature 1..36: note = Synthetic oligonucleotide
  source 1..36: mol_type = other DNA

SEQ ID NO: 26431 - DNA, 36 bp, synthetic construct; identical to SEQ ID NO: 11956
  misc_feature 1..36: note = Synthetic oligonucleotide
  source 1..36: mol_type = other DNA

SEQ ID NO: 26432 - DNA, 36 bp, synthetic construct; identical to SEQ ID NO: 11957
  misc_feature 1..36: note = Synthetic oligonucleotide
  source 1..36: mol_type = other DNA

SEQ ID NO: 26433 - DNA, 36 bp, synthetic construct; identical to SEQ ID NO: 11957
  misc_feature 1..36: note = Synthetic oligonucleotide
  source 1..36: mol_type = other DNA

SEQ ID NO: 26434 - DNA, 36 bp, synthetic construct; identical to SEQ ID NO: 11957
  misc_feature 1..36: note = Synthetic oligonucleotide
  source 1..36: mol_type = other DNA

SEQ ID NO: 26435 - DNA, 36 bp, synthetic construct
  misc_feature 1..36: note = Synthetic oligonucleotide
  source 1..36: mol_type = other DNA
gctgcggattgcggccgtttctcggtttgctacact

SEQ ID NO: 26436 - DNA, 36 bp, synthetic construct
  misc_feature 1..36: note = Synthetic oligonucleotide
  source 1..36: mol_type = other DNA
gctgcggattgcggcctctcctcgttttgctacagt

SEQ ID NO: 26437 - DNA, 36 bp, synthetic construct
  misc_feature 1..36: note = Synthetic oligonucleotide
  source 1..36: mol_type = other DNA
gctgcggattgcggtcgcctctcgttttgctactct

SEQ ID NO: 26438 - DNA, 36 bp, synthetic construct
  misc_feature 1..36: note = Synthetic oligonucleotide
  source 1..36: mol_type = other DNA
gctgcggattgcgtccgtctctcgttttgctacaat

SEQ ID NO: 26439 - DNA, 36 bp, synthetic construct
  misc_feature 1..36: note = Synthetic oligonucleotide
  source 1..36: mol_type = other DNA
gctgcggctggaccacgatctctgaactgctatgct

SEQ ID NO: 26440 - DNA, 36 bp, synthetic construct; identical to SEQ ID NO: 11958
  misc_feature 1..36: note = Synthetic oligonucleotide
  source 1..36: mol_type = other DNA

SEQ ID NO: 26441 - DNA, 36 bp, synthetic construct; identical to SEQ ID NO: 11959
  misc_feature 1..36: note = Synthetic oligonucleotide
  source 1..36: mol_type = other DNA

SEQ ID NO: 26442 - DNA, 36 bp, synthetic construct
  misc_feature 1..36: note = Synthetic oligonucleotide
  source 1..36: mol_type = other DNA
gctgcggcttgcgatcatctctcggtttgctacact

SEQ ID NO: 26443 - DNA, 36 bp, synthetic construct; identical to SEQ ID NO: 11961
  misc_feature 1..36: note = Synthetic oligonucleotide
  source 1..36: mol_type = other DNA

SEQ ID NO: 26444 - DNA, 36 bp, synthetic construct
  misc_feature 1..36: note = Synthetic oligonucleotide
  source 1..36: mol_type = other DNA
gctgcggcttgcggtcgtctctcgttttgctacact

SEQ ID NO: 26445 - DNA, 36 bp, synthetic construct
  misc_feature 1..36: note = Synthetic oligonucleotide
  source 1..36: mol_type = other DNA
gctgcggcttgcggtcttctctcgttttgctacact

SEQ ID NO: 26446 - DNA, 36 bp, synthetic construct; identical to SEQ ID NO: 26445
  misc_feature 1..36: note = Synthetic oligonucleotide
  source 1..36: mol_type = other DNA

SEQ ID NO: 26447 - DNA, 36 bp, synthetic construct; identical to SEQ ID NO: 26445
  misc_feature 1..36: note = Synthetic oligonucleotide
  source 1..36: mol_type = other DNA

SEQ ID NO: 26448 - DNA, 36 bp, synthetic construct
  misc_feature 1..36: note = Synthetic oligonucleotide
  source 1..36: mol_type = other DNA
gctgcggtaggcggccattccgaagtctgctactct

SEQ ID NO: 26449 - DNA, 36 bp, synthetic construct
  misc_feature 1..36: note = Synthetic oligonucleotide
  source 1..36: mol_type = other DNA
gctgcggttggacctcaaatccctatcggctaagat

SEQ ID NO: 26450 - DNA, 36 bp, synthetic construct
  misc_feature 1..36: note = Synthetic oligonucleotide
  source 1..36: mol_type = other DNA
gctgcggttggcctgcaattcctgaactgctaccgt

SEQ ID NO: 26451 - DNA, 36 bp, synthetic construct
  misc_feature 1..36: note = Synthetic oligonucleotide
  source 1..36: mol_type = other DNA
gctgcggttggcctgcgatatctgagatgctatgac

SEQ ID NO: 26452 - DNA, 37 bp, synthetic construct
  misc_feature 1..37: note = Synthetic oligonucleotide
  source 1..37: mol_type = other DNA
gctgcggtttgcggccaattcctcgtttgctagactg

SEQ ID NO: 26453 - DNA, 36 bp, synthetic construct
  misc_feature 1..36: note = Synthetic oligonucleotide
  source 1..36: mol_type = other DNA
gctgcggtttgcggccgcatcgggcatcgctacact

SEQ ID NO: 26454 - DNA, 36 bp, synthetic construct
  misc_feature 1..36: note = Synthetic oligonucleotide
  source 1..36: mol_type = other DNA
gctgcggtttgcggggattccggggtttgctacact

SEQ ID NO: 26455 - DNA, 36 bp, synthetic construct
  misc_feature 1..36: note = Synthetic oligonucleotide
  source 1..36: mol_type = other DNA
gctgctgctggccttcgatttctgaactgctaggct

SEQ ID NO: 26456 - DNA, 36 bp, synthetic construct
  misc_feature 1..36: note = Synthetic oligonucleotide
  source 1..36: mol_type = other DNA
gctggaattggtggaagctgaccggacagctacagt

SEQ ID NO: 26457 - DNA, 36 bp, synthetic construct; identical to SEQ ID NO: 26456
  misc_feature 1..36: note = Synthetic oligonucleotide
  source 1..36: mol_type = other DNA

SEQ ID NO: 26458 - DNA, 36 bp, synthetic construct
  misc_feature 1..36: note = Synthetic oligonucleotide
  source 1..36: mol_type = other DNA
gctggagaactgcgtccaaagtaggctgaccaaaac

SEQ ID NO: 26459 - DNA, 36 bp, synthetic construct; identical to SEQ ID NO: 11973
  misc_feature 1..36: note = Synthetic oligonucleotide
  source 1..36: mol_type = other DNA

SEQ ID NO: 26460 - DNA, 36 bp, synthetic construct
  misc_feature 1..36: note = Synthetic oligonucleotide
  source 1..36: mol_type = other DNA
gctggagcttgtagagttttaggttgatgctatatt

SEQ ID NO: 26461 - DNA, 36 bp, synthetic construct
  misc_feature 1..36: note = Synthetic oligonucleotide
  source 1..36: mol_type = other DNA
gctggagtcggtcgggaaccttcgctcagatacgct

SEQ ID NO: 26462 - DNA, 36 bp, synthetic construct
  misc_feature 1..36: note = Synthetic oligonucleotide
  source 1..36: mol_type = other DNA
gctggagttgacagggaaccgtcggttgagtacatt

SEQ ID NO: 26463 - DNA, 36 bp, synthetic construct
  misc_feature 1..36: note = Synthetic oligonucleotide
  source 1..36: mol_type = other DNA
gctggagttggccgagattcaccgctcaagtacact

SEQ ID NO: 26464 - DNA, 36 bp, synthetic construct
  misc_feature 1..36: note = Synthetic oligonucleotide
  source 1..36: mol_type = other DNA
gctggagttgtgcgtccaaagtagggtgactaaaac

SEQ ID NO: 26465 - DNA, 36 bp, synthetic construct
  misc_feature 1..36: note = Synthetic oligonucleotide
  source 1..36: mol_type = other DNA
gctgggaatcaaatctccttatccctgatagacttg

SEQ ID NO: 26466 - DNA, 36 bp, synthetic construct
  misc_feature 1..36: note = Synthetic oligonucleotide
  source 1..36: mol_type = other DNA
gctgggaatcaatcaccaatcccccttgatatactg

SEQ ID NO: 26467 - DNA, 36 bp, synthetic construct
  misc_feature 1..36: note = Synthetic oligonucleotide
  source 1..36: mol_type = other DNA
gctgggaatcaatcaccaatcccctttgatacactg

SEQ ID NO: 26468 - DNA, 36 bp, synthetic construct; identical to SEQ ID NO: 26467
  misc_feature 1..36: note = Synthetic oligonucleotide
  source 1..36: mol_type = other DNA

SEQ ID NO: 26469 - DNA, 36 bp, synthetic construct; identical to SEQ ID NO: 11974
  misc_feature 1..36: note = Synthetic oligonucleotide
  source 1..36: mol_type = other DNA

SEQ ID NO: 26470 - DNA, 36 bp, synthetic construct; identical to SEQ ID NO: 11974
  misc_feature 1..36: note = Synthetic oligonucleotide
  source 1..36: mol_type = other DNA

SEQ ID NO: 26471 - DNA, 36 bp, synthetic construct; identical to SEQ ID NO: 11974
  misc_feature 1..36: note = Synthetic oligonucleotide
  source 1..36: mol_type = other DNA

SEQ ID NO: 26472 - DNA, 36 bp, synthetic construct; identical to SEQ ID NO: 11974
  misc_feature 1..36: note = Synthetic oligonucleotide
  source 1..36: mol_type = other DNA

SEQ ID NO: 26473 - DNA, 36 bp, synthetic construct
  misc_feature 1..36: note = Synthetic oligonucleotide
  source 1..36: mol_type = other DNA
gctgggaatcaatcaccaatcccctttgatactctt

SEQ ID NO: 26474 - DNA, 36 bp, synthetic construct; identical to SEQ ID NO: 11976
  misc_feature 1..36: note = Synthetic oligonucleotide
  source 1..36: mol_type = other DNA

SEQ ID NO: 26475 - DNA, 36 bp, synthetic construct; identical to SEQ ID NO: 11976
  misc_feature 1..36: note = Synthetic oligonucleotide
  source 1..36: mol_type = other DNA

SEQ ID NO: 26476 - DNA, 36 bp, synthetic construct; identical to SEQ ID NO: 11976
  misc_feature 1..36: note = Synthetic oligonucleotide
  source 1..36: mol_type = other DNA

SEQ ID NO: 26477 - DNA, 36 bp, synthetic construct; identical to SEQ ID NO: 11976
  misc_feature 1..36: note = Synthetic oligonucleotide
  source 1..36: mol_type = other DNA

SEQ ID NO: 26478 - DNA, 36 bp, synthetic construct; identical to SEQ ID NO: 11976
  misc_feature 1..36: note = Synthetic oligonucleotide
  source 1..36: mol_type = other DNA

SEQ ID NO: 26479 - DNA, 36 bp, synthetic construct; identical to SEQ ID NO: 11976
  misc_feature 1..36: note = Synthetic oligonucleotide
  source 1..36: mol_type = other DNA

SEQ ID NO: 26480 - DNA, 36 bp, synthetic construct; identical to SEQ ID NO: 11976
  misc_feature 1..36: note = Synthetic oligonucleotide
  source 1..36: mol_type = other DNA

SEQ ID NO: 26481 - DNA, 36 bp, synthetic construct; identical to SEQ ID NO: 11976
  misc_feature 1..36: note = Synthetic oligonucleotide
  source 1..36: mol_type = other DNA

SEQ ID NO: 26482 - DNA, 36 bp, synthetic construct; identical to SEQ ID NO: 11976
  misc_feature 1..36: note = Synthetic oligonucleotide
  source 1..36: mol_type = other DNA

SEQ ID NO: 26483 - DNA, 36 bp, synthetic construct; identical to SEQ ID NO: 11976
  misc_feature 1..36: note = Synthetic oligonucleotide
  source 1..36: mol_type = other DNA

SEQ ID NO: 26484 - DNA, 36 bp, synthetic construct; identical to SEQ ID NO: 11976
  misc_feature 1..36: note = Synthetic oligonucleotide
  source 1..36: mol_type = other DNA

SEQ ID NO: 26485 - DNA, 36 bp, synthetic construct; identical to SEQ ID NO: 11977
  misc_feature 1..36: note = Synthetic oligonucleotide
  source 1..36: mol_type = other DNA

SEQ ID NO: 26486 - DNA, 36 bp, synthetic construct
  misc_feature 1..36: note = Synthetic oligonucleotide
  source 1..36: mol_type = other DNA
gctgggaatcagtcaccaaaccccttgatagacttc

SEQ ID NO: 26487 - DNA, 36 bp, synthetic construct
  misc_feature 1..36: note = Synthetic oligonucleotide
  source 1..36: mol_type = other DNA
gctgggaatcagtcaccaatcccctttgatatactg

SEQ ID NO: 26488 - DNA, 36 bp, synthetic construct; identical to SEQ ID NO: 11980
  misc_feature 1..36: note = Synthetic oligonucleotide
  source 1..36: mol_type = other DNA

SEQ ID NO: 26489 - DNA, 36 bp, synthetic construct; identical to SEQ ID NO: 11980
  misc_feature 1..36: note = Synthetic oligonucleotide
  source 1..36: mol_type = other DNA

SEQ ID NO: 26490 - DNA, 36 bp, synthetic construct; identical to SEQ ID NO: 11981
  misc_feature 1..36: note = Synthetic oligonucleotide
  source 1..36: mol_type = other DNA

SEQ ID NO: 26491 - DNA, 36 bp, synthetic construct; identical to SEQ ID NO: 11981
  misc_feature 1..36: note = Synthetic oligonucleotide
  source 1..36: mol_type = other DNA

SEQ ID NO: 26492 - DNA, 36 bp, synthetic construct; identical to SEQ ID NO: 11982
  misc_feature 1..36: note = Synthetic oligonucleotide
  source 1..36: mol_type = other DNA

SEQ ID NO: 26493 - DNA, 36 bp, synthetic construct; identical to SEQ ID NO: 11984
  misc_feature 1..36: note = Synthetic oligonucleotide
  source 1..36: mol_type = other DNA

SEQ ID NO: 26494 - DNA, 36 bp, synthetic construct
  misc_feature 1..36: note = Synthetic oligonucleotide
  source 1..36: mol_type = other DNA
gctgggaatcagttctccgtccccctgatagacttc

SEQ ID NO: 26495 - DNA, 36 bp, synthetic construct; identical to SEQ ID NO: 11987
  misc_feature 1..36: note = Synthetic oligonucleotide
  source 1..36: mol_type = other DNA

SEQ ID NO: 26496 - DNA, 36 bp, synthetic construct; identical to SEQ ID NO: 11987
  misc_feature 1..36: note = Synthetic oligonucleotide
  source 1..36: mol_type = other DNA

SEQ ID NO: 26497 - DNA, 36 bp, synthetic construct; identical to SEQ ID NO: 11987
  misc_feature 1..36: note = Synthetic oligonucleotide
  source 1..36: mol_type = other DNA

SEQ ID NO: 26498 - DNA, 36 bp, synthetic construct; identical to SEQ ID NO: 11987
  misc_feature 1..36: note = Synthetic oligonucleotide
  source 1..36: mol_type = other DNA

SEQ ID NO: 26499 - DNA, 36 bp, synthetic construct; identical to SEQ ID NO: 11987
  misc_feature 1..36: note = Synthetic oligonucleotide
  source 1..36: mol_type = other DNA

SEQ ID NO: 26500 - DNA, 36 bp, synthetic construct; identical to SEQ ID NO: 11987
  misc_feature 1..36: note = Synthetic oligonucleotide
  source 1..36: mol_type = other DNA

SEQ ID NO: 26501 - DNA, 36 bp, synthetic construct; identical to SEQ ID NO: 11987
  misc_feature 1..36: note = Synthetic oligonucleotide
  source 1..36: mol_type = other DNA

SEQ ID NO: 26502 - DNA, 36 bp, synthetic construct; identical to SEQ ID NO: 11987
  misc_feature 1..36: note = Synthetic oligonucleotide
  source 1..36: mol_type = other DNA

SEQ ID NO: 26503 - DNA, 36 bp, synthetic construct; identical to SEQ ID NO: 11987
  misc_feature 1..36: note = Synthetic oligonucleotide
  source 1..36: mol_type = other DNA

SEQ ID NO: 26504 - DNA, 36 bp, synthetic construct; identical to SEQ ID NO: 11987
  misc_feature 1..36: note = Synthetic oligonucleotide
  source 1..36: mol_type = other DNA

SEQ ID NO: 26505 - DNA, 36 bp, synthetic construct; identical to SEQ ID NO: 11987
  misc_feature 1..36: note = Synthetic oligonucleotide
  source 1..36: mol_type = other DNA

SEQ ID NO: 26506 - DNA, 36 bp, synthetic construct; identical to SEQ ID NO: 11987
  misc_feature 1..36: note = Synthetic oligonucleotide
  source 1..36: mol_type = other DNA

SEQ ID NO: 26507 - DNA, 36 bp, synthetic construct; identical to SEQ ID NO: 11987
  misc_feature 1..36: note = Synthetic oligonucleotide
  source 1..36: mol_type = other DNA

SEQ ID NO: 26508 - DNA, 36 bp, synthetic construct
  misc_feature 1..36: note = Synthetic oligonucleotide
  source 1..36: mol_type = other DNA
gctgggacttgacaggaaccgccgcttaagtacatt

SEQ ID NO: 26509 - DNA, 36 bp, synthetic construct; identical to SEQ ID NO: 26508
  misc_feature 1..36: note = Synthetic oligonucleotide
  source 1..36: mol_type = other DNA

SEQ ID NO: 26510 - DNA, 36 bp, synthetic construct
  misc_feature 1..36: note = Synthetic oligonucleotide
  source 1..36: mol_type = other DNA
gctgggacttgtagagtatttcttggaagatatagt

SEQ ID NO: 26511 - DNA, 36 bp, synthetic construct; identical to SEQ ID NO: 11990
  misc_feature 1..36: note = Synthetic oligonucleotide
  source 1..36: mol_type = other DNA

SEQ ID NO: 26512 - DNA, 36 bp, synthetic construct; identical to SEQ ID NO: 11990
  misc_feature 1..36: note = Synthetic oligonucleotide
  source 1..36: mol_type = other DNA

SEQ ID NO: 26513 - DNA, 36 bp, synthetic construct
  misc_feature 1..36: note = Synthetic oligonucleotide
  source 1..36: mol_type = other DNA
gctgggattcagtcaccagaccccttgataggcttc

SEQ ID NO: 26514 - DNA, 36 bp, synthetic construct
  misc_feature 1..36: note = Synthetic oligonucleotide
  source 1..36: mol_type = other DNA
gctgggattcagtcaccagactccttgatagacttc

SEQ ID NO: 26515 - DNA, 36 bp, synthetic construct
  misc_feature 1..36: note = Synthetic oligonucleotide
  source 1..36: mol_type = other DNA
gctgggattcagtcaccagtccccttgatagacttc

SEQ ID NO: 26516 - DNA, 36 bp, synthetic construct; identical to SEQ ID NO: 11993
  misc_feature 1..36: note = Synthetic oligonucleotide
  source 1..36: mol_type = other DNA

SEQ ID NO: 26517 - DNA, 36 bp, synthetic construct; identical to SEQ ID NO: 11993
  misc_feature 1..36: note = Synthetic oligonucleotide
  source 1..36: mol_type = other DNA

SEQ ID NO: 26518 - DNA, 36 bp, synthetic construct; identical to SEQ ID NO: 11994
  misc_feature 1..36: note = Synthetic oligonucleotide
  source 1..36: mol_type = other DNA

SEQ ID NO: 26519 - DNA, 36 bp, synthetic construct; identical to SEQ ID NO: 11994
  misc_feature 1..36: note = Synthetic oligonucleotide
  source 1..36: mol_type = other DNA

SEQ ID NO: 26520 - DNA, 36 bp, synthetic construct
  misc_feature 1..36: note = Synthetic oligonucleotide
  source 1..36: mol_type = other DNA
gctggggatcagttcaagttccccctgatagacttc

SEQ ID NO: 26521 - DNA, 36 bp, synthetic construct
  misc_feature 1..36: note = Synthetic oligonucleotide
  source 1..36: mol_type = other DNA
gctggggatcagttcccgttttccctgatatacttg

SEQ ID NO: 26522 - DNA, 36 bp, synthetic construct; identical to SEQ ID NO: 11996
  misc_feature 1..36: note = Synthetic oligonucleotide
  source 1..36: mol_type = other DNA

SEQ ID NO: 26523 - DNA, 36 bp, synthetic construct; identical to SEQ ID NO: 11997
  misc_feature 1..36: note = Synthetic oligonucleotide
  source 1..36: mol_type = other DNA

SEQ ID NO: 26524 - DNA, 36 bp, synthetic construct; identical to SEQ ID NO: 11997
  misc_feature 1..36: note = Synthetic oligonucleotide
  source 1..36: mol_type = other DNA

SEQ ID NO: 26525 - DNA, 36 bp, synthetic construct; identical to SEQ ID NO: 11998
  misc_feature 1..36: note = Synthetic oligonucleotide
  source 1..36: mol_type = other DNA

SEQ ID NO: 26526 - DNA, 36 bp, synthetic construct
  misc_feature 1..36: note = Synthetic oligonucleotide
  source 1..36: mol_type = other DNA
gctggggatggccgggaatcaccgctcaagtacact

SEQ ID NO: 26527 - DNA, 36 bp, synthetic construct
  misc_feature 1..36: note = Synthetic oligonucleotide
  source 1..36: mol_type = other DNA
gctggggatggccgggaatcaccgctcacgtacact

SEQ ID NO: 26528 - DNA, 36 bp, synthetic construct; identical to SEQ ID NO: 26527
  misc_feature 1..36: note = Synthetic oligonucleotide
  source 1..36: mol_type = other DNA

SEQ ID NO: 26529 - DNA, 36 bp, synthetic construct; identical to SEQ ID NO: 26527
  misc_feature 1..36: note = Synthetic oligonucleotide
  source 1..36: mol_type = other DNA

SEQ ID NO: 26530 - DNA, 36 bp, synthetic construct
  misc_feature 1..36: note = Synthetic oligonucleotide
  source 1..36: mol_type = other DNA
gctggggatggccgggaatcaccgctcatgtacact

SEQ ID NO: 26531 - DNA, 36 bp, synthetic construct
  misc_feature 1..36: note = Synthetic oligonucleotide
  source 1..36: mol_type = other DNA
gctggggatggccgggaatcgccgctcaagtacact

SEQ ID NO: 26532 - DNA, 36 bp, synthetic construct; identical to SEQ ID NO: 26531
  misc_feature 1..36: note = Synthetic oligonucleotide
  source 1..36: mol_type = other DNA

SEQ ID NO: 26533 - DNA, 36 bp, synthetic construct; identical to SEQ ID NO: 26531
  misc_feature 1..36: note = Synthetic oligonucleotide
  source 1..36: mol_type = other DNA

SEQ ID NO: 26534 - DNA, 36 bp, synthetic construct; identical to SEQ ID NO: 26531
  misc_feature 1..36: note = Synthetic oligonucleotide
  source 1..36: mol_type = other DNA

SEQ ID NO: 26535 - DNA, 36 bp, synthetic construct
  misc_feature 1..36: note = Synthetic oligonucleotide
  source 1..36: mol_type = other DNA
gctggggatggccgggaatcgtcgctcaagtacact

SEQ ID NO: 26536 - DNA, 36 bp, synthetic construct
  misc_feature 1..36: note = Synthetic oligonucleotide
  source 1..36: mol_type = other DNA
gctggggatggccgggagtcgccgctcaagtacact

SEQ ID NO: 26537 - DNA, 36 bp, synthetic construct; identical to SEQ ID NO: 26536
  misc_feature 1..36: note = Synthetic oligonucleotide
  source 1..36: mol_type = other DNA

SEQ ID NO: 26538 - DNA, 36 bp, synthetic construct; identical to SEQ ID NO: 26536
  misc_feature 1..36: note = Synthetic oligonucleotide
  source 1..36: mol_type = other DNA

SEQ ID NO: 26539 - DNA, 36 bp, synthetic construct; identical to SEQ ID NO: 12001
  misc_feature 1..36: note = Synthetic oligonucleotide
  source 1..36: mol_type = other DNA

SEQ ID NO: 26540 - DNA, 36 bp, synthetic construct; identical to SEQ ID NO: 12001
  misc_feature 1..36: note = Synthetic oligonucleotide
  source 1..36: mol_type = other DNA

SEQ ID NO: 26541 - DNA, 36 bp, synthetic construct; identical to SEQ ID NO: 12001
  misc_feature 1..36: note = Synthetic oligonucleotide
  source 1..36: mol_type = other DNA

SEQ ID NO: 26542 - DNA, 36 bp, synthetic construct; identical to SEQ ID NO: 12002
  misc_feature 1..36: note = Synthetic oligonucleotide
  source 1..36: mol_type = other DNA

SEQ ID NO: 26543 - DNA, 36 bp, synthetic construct; identical to SEQ ID NO: 12002
  misc_feature 1..36: note = Synthetic oligonucleotide
  source 1..36: mol_type = other DNA

SEQ ID NO: 26544 - DNA, 36 bp, synthetic construct
  misc_feature 1..36: note = Synthetic oligonucleotide
  source 1..36: mol_type = other DNA
gctggggattgactttaaccgtcgattgagtacatt

SEQ ID NO: 26545 - DNA, 36 bp, synthetic construct
  misc_feature 1..36: note = Synthetic oligonucleotide
  source 1..36: mol_type = other DNA
gctggggcccgctgggaatcgccgcttaggtacaat

SEQ ID NO: 26546 - DNA, 36 bp, synthetic construct
  misc_feature 1..36: note = Synthetic oligonucleotide
  source 1..36: mol_type = other DNA
gctggggcctgcagacaatcgccgattaggtacaat

SEQ ID NO: 26547 - DNA, 36 bp, synthetic construct
  misc_feature 1..36: note = Synthetic oligonucleotide
  source 1..36: mol_type = other DNA
gctggggcttgacaacaaaatccgctcaagtacaat

SEQ ID NO: 26548 - DNA, 36 bp, synthetic construct
  misc_feature 1..36: note = Synthetic oligonucleotide
  source 1..36: mol_type = other DNA
gctggggcttgcagagttttttgattccggtacatt

SEQ ID NO: 26549 - DNA, 36 bp, synthetic construct; identical to SEQ ID NO: 26548
  misc_feature 1..36: note = Synthetic oligonucleotide
  source 1..36: mol_type = other DNA

SEQ ID NO: 26550 - DNA, 36 bp, synthetic construct
  misc_feature 1..36: note = Synthetic oligonucleotide
  source 1..36: mol_type = other DNA
gctggggcttgcggagaatcgccgctcaggtacact

SEQ ID NO: 26551 - DNA, 36 bp, synthetic construct
  misc_feature 1..36: note = Synthetic oligonucleotide
  source 1..36: mol_type = other DNA
gctggggcttgtaaggaattttttatatgctataat

SEQ ID NO: 26552 - DNA, 36 bp, synthetic construct; identical to SEQ ID NO: 12014
  misc_feature 1..36: note = Synthetic oligonucleotide
  source 1..36: mol_type = other DNA

SEQ ID NO: 26553 - DNA, 36 bp, synthetic construct
  misc_feature 1..36: note = Synthetic oligonucleotide
  source 1..36: mol_type = other DNA
gctggggcttgtagagtttgaaaaatgtgctatatt

SEQ ID NO: 26554 - DNA, 36 bp, synthetic construct
  misc_feature 1..36: note = Synthetic oligonucleotide
  source 1..36: mol_type = other DNA
gctggggcttgtagagtttgaaaagtgtgctatatt

SEQ ID NO: 26555 - DNA, 36 bp, synthetic construct; identical to SEQ ID NO: 26554
  misc_feature 1..36: note = Synthetic oligonucleotide
  source 1..36: mol_type = other DNA

SEQ ID NO: 26556 - DNA, 36 bp, synthetic construct; identical to SEQ ID NO: 26554
  misc_feature 1..36: note = Synthetic oligonucleotide
  source 1..36: mol_type = other DNA

SEQ ID NO: 26557 - DNA, 36 bp, synthetic construct; identical to SEQ ID NO: 12017
  misc_feature 1..36: note = Synthetic oligonucleotide
  source 1..36: mol_type = other DNA

SEQ ID NO: 26558 - DNA, 36 bp, synthetic construct
  misc_feature 1..36: note = Synthetic oligonucleotide
  source 1..36: mol_type = other DNA
gctggggttcaactcttacactccctgatatacttg

SEQ ID NO: 26559 - DNA, 36 bp, synthetic construct; identical to SEQ ID NO: 26558
  misc_feature 1..36: note = Synthetic oligonucleotide
  source 1..36: mol_type = other DNA

SEQ ID NO: 26560 - DNA, 36 bp, synthetic construct; identical to SEQ ID NO: 26558
  misc_feature 1..36: note = Synthetic oligonucleotide
  source 1..36: mol_type = other DNA

SEQ ID NO: 26561 - DNA, 36 bp, synthetic construct; identical to SEQ ID NO: 26558
  misc_feature 1..36: note = Synthetic oligonucleotide
  source 1..36: mol_type = other DNA

SEQ ID NO: 26562 - DNA, 36 bp, synthetic construct; identical to SEQ ID NO: 26558
  misc_feature 1..36: note = Synthetic oligonucleotide
  source 1..36: mol_type = other DNA

SEQ ID NO: 26563 - DNA, 37 bp, synthetic construct
  misc_feature 1..37: note = Synthetic oligonucleotide
  source 1..37: mol_type = other DNA
gctggggttcaactcttacactccctgatatacttga

SEQ ID NO: 26564 - DNA, 37 bp, synthetic construct; identical to SEQ ID NO: 26563
  misc_feature 1..37: note = Synthetic oligonucleotide
  source 1..37: mol_type = other DNA

SEQ ID NO: 26565 - DNA, 37 bp, synthetic construct; identical to SEQ ID NO: 12018
  misc_feature 1..37: note = Synthetic oligonucleotide
  source 1..37: mol_type = other DNA

SEQ ID NO: 26566 - DNA, 36 bp, synthetic construct; identical to SEQ ID NO: 12019
  misc_feature 1..36: note = Synthetic oligonucleotide
  source 1..36: mol_type = other DNA

SEQ ID NO: 26567 - DNA, 36 bp, synthetic construct; identical to SEQ ID NO: 12022
  misc_feature 1..36: note = Synthetic oligonucleotide
  source 1..36: mol_type = other DNA

SEQ ID NO: 26568 - DNA, 36 bp, synthetic construct; identical to SEQ ID NO: 12023
  misc_feature 1..36: note = Synthetic oligonucleotide
  source 1..36: mol_type = other DNA

SEQ ID NO: 26569 - DNA, 36 bp, synthetic construct; identical to SEQ ID NO: 12024
  misc_feature 1..36: note = Synthetic oligonucleotide
  source 1..36: mol_type = other DNA

SEQ ID NO: 26570 - DNA, 36 bp, synthetic construct; identical to SEQ ID NO: 12025
  misc_feature 1..36: note = Synthetic oligonucleotide
  source 1..36: mol_type = other DNA

SEQ ID NO: 26571 - DNA, 36 bp, synthetic construct
  misc_feature 1..36: note = Synthetic oligonucleotide
  source 1..36: mol_type = other DNA
gctggggttcgactctcaaatcccttgatatacttg

SEQ ID NO: 26572 - DNA, 36 bp, synthetic construct
  misc_feature 1..36: note = Synthetic oligonucleotide
  source 1..36: mol_type = other DNA
gctggggttggccgagaatcgccgctcaggtatact

SEQ ID NO: 26573 - DNA, 36 bp, synthetic construct; identical to SEQ ID NO: 26572
  misc_feature 1..36: note = Synthetic oligonucleotide
  source 1..36: mol_type = other DNA

SEQ ID NO: 26574 - DNA, 36 bp, synthetic construct; identical to SEQ ID NO: 26572
  misc_feature 1..36: note = Synthetic oligonucleotide
  source 1..36: mol_type = other DNA

SEQ ID NO: 26575 - DNA, 36 bp, synthetic construct
  misc_feature 1..36: note = Synthetic oligonucleotide
  source 1..36: mol_type = other DNA
gctggggttggccgggagtcgccgctcagatatact

SEQ ID NO: 26576 - DNA, 36 bp, synthetic construct; identical to SEQ ID NO: 12030
  misc_feature 1..36: note = Synthetic oligonucleotide
  source 1..36: mol_type = other DNA

SEQ ID NO: 26577 - DNA, 36 bp, synthetic construct; identical to SEQ ID NO: 12031
  misc_feature 1..36: note = Synthetic oligonucleotide
  source 1..36: mol_type = other DNA

SEQ ID NO: 26578 - DNA, 36 bp, synthetic construct; identical to SEQ ID NO: 12033
  misc_feature 1..36: note = Synthetic oligonucleotide
  source 1..36: mol_type = other DNA

SEQ ID NO: 26579 - DNA, 36 bp, synthetic construct; identical to SEQ ID NO: 12034
  misc_feature 1..36: note = Synthetic oligonucleotide
  source 1..36: mol_type = other DNA

SEQ ID NO: 26580 - DNA, 36 bp, synthetic construct; identical to SEQ ID NO: 12034
  misc_feature 1..36: note = Synthetic oligonucleotide
  source 1..36: mol_type = other DNA

SEQ ID NO: 26581 - DNA, 37 bp, synthetic construct
  misc_feature 1..37: note = Synthetic oligonucleotide
  source 1..37: mol_type = other DNA
gctgtaaagccgggcataaaaatacaaaatgtaatca

SEQ ID NO: 26582 - DNA, 36 bp, synthetic construct
  misc_feature 1..36: note = Synthetic oligonucleotide
  source 1..36: mol_type = other DNA
gctgtaaatgaacacgttttgaaagccattcacaac

SEQ ID NO: 26583 - DNA, 29 bp, synthetic construct
  misc_feature 1..29: note = Synthetic oligonucleotide
  source 1..29: mol_type = other DNA
gctgtaagttcttatgcaaagttactaaa

SEQ ID NO: 26584 - DNA, 29 bp, synthetic construct
  misc_feature 1..29: note = Synthetic oligonucleotide
  source 1..29: mol_type = other DNA
gctgtaagttcttatgcaaagttactaaa

SEQ ID NO: 26585 - DNA, 36 bp, synthetic construct
  misc_feature 1..36: note = Synthetic oligonucleotide
  source 1..36: mol_type = other DNA
gctgtacatacatctaaaactacttagttctaaaac

SEQ ID NO: 26586 - DNA, 36 bp, synthetic construct
  misc_feature 1..36: note = Synthetic oligonucleotide
  source 1..36: mol_type = other DNA
gctgtagccccctgttattccttggtatgctataat

SEQ ID NO: 26587 - DNA, 36 bp, synthetic construct; identical to SEQ ID NO: 12046
  misc_feature 1..36: note = Synthetic oligonucleotide
  source 1..36: mol_type = other DNA

SEQ ID NO: 26588 - DNA, 36 bp, synthetic construct; identical to SEQ ID NO: 12046
  misc_feature 1..36: note = Synthetic oligonucleotide
  source 1..36: mol_type = other DNA

SEQ ID NO: 26589 - DNA, 36 bp, synthetic construct; identical to SEQ ID NO: 12046
  misc_feature 1..36: note = Synthetic oligonucleotide
  source 1..36: mol_type = other DNA

SEQ ID NO: 26590 - DNA, 36 bp, synthetic construct; identical to SEQ ID NO: 12046
  misc_feature 1..36: note = Synthetic oligonucleotide
  source 1..36: mol_type = other DNA

SEQ ID NO: 26591 - DNA, 36 bp, synthetic construct; identical to SEQ ID NO: 12046
  misc_feature 1..36: note = Synthetic oligonucleotide
  source 1..36: mol_type = other DNA

SEQ ID NO: 26592 - DNA, 36 bp, synthetic construct; identical to SEQ ID NO: 12046
  misc_feature 1..36: note = Synthetic oligonucleotide
  source 1..36: mol_type = other DNA

SEQ ID NO: 26593 - DNA, 36 bp, synthetic construct
  misc_feature 1..36: note = Synthetic oligonucleotide
  source 1..36: mol_type = other DNA
gctgtagctctctggtagttcttggtatgaaataac

SEQ ID NO: 26594 - DNA, 36 bp, synthetic construct
  misc_feature 1..36: note = Synthetic oligonucleotide
  source 1..36: mol_type = other DNA
gctgtagctgacctccaaaacagcatgtgctacagt

SEQ ID NO: 26595 - DNA, 36 bp, synthetic construct
  misc_feature 1..36: note = Synthetic oligonucleotide
  source 1..36: mol_type = other DNA
gctgtagcttgcggggaatcgtcgctcggatatact

SEQ ID NO: 26596 - DNA, 36 bp, synthetic construct; identical to SEQ ID NO: 12051
  misc_feature 1..36: note = Synthetic oligonucleotide
  source 1..36: mol_type = other DNA

SEQ ID NO: 26597 - DNA, 36 bp, synthetic construct
  misc_feature 1..36: note = Synthetic oligonucleotide
  source 1..36: mol_type = other DNA
gctgtagttccctattatttcttggtatggtataat

SEQ ID NO: 26598 - DNA, 36 bp, synthetic construct; identical to SEQ ID NO: 26597
  misc_feature 1..36: note = Synthetic oligonucleotide
  source 1..36: mol_type = other DNA

SEQ ID NO: 26599 - DNA, 36 bp, synthetic construct; identical to SEQ ID NO: 26597
  misc_feature 1..36: note = Synthetic oligonucleotide
  source 1..36: mol_type = other DNA

SEQ ID NO: 26600 - DNA, 36 bp, synthetic construct; identical to SEQ ID NO: 26597
  misc_feature 1..36: note = Synthetic oligonucleotide
  source 1..36: mol_type = other DNA

SEQ ID NO: 26601 - DNA, 36 bp, synthetic construct; identical to SEQ ID NO: 26597
  misc_feature 1..36: note = Synthetic oligonucleotide
  source 1..36: mol_type = other DNA

SEQ ID NO: 26602 - DNA, 36 bp, synthetic construct; identical to SEQ ID NO: 26597
  misc_feature 1..36: note = Synthetic oligonucleotide
  source 1..36: mol_type = other DNA

SEQ ID NO: 26603 - DNA, 36 bp, synthetic construct; identical to SEQ ID NO: 26597
  misc_feature 1..36: note = Synthetic oligonucleotide
  source 1..36: mol_type = other DNA

SEQ ID NO: 26604 - DNA, 36 bp, synthetic construct; identical to SEQ ID NO: 26597
  misc_feature 1..36: note = Synthetic oligonucleotide
  source 1..36: mol_type = other DNA

SEQ ID NO: 26605 - DNA, 36 bp, synthetic construct; identical to SEQ ID NO: 26597
  misc_feature 1..36: note = Synthetic oligonucleotide
  source 1..36: mol_type = other DNA

SEQ ID NO: 26606 - DNA, 36 bp, synthetic construct; identical to SEQ ID NO: 26597
  misc_feature 1..36: note = Synthetic oligonucleotide
  source 1..36: mol_type = other DNA

SEQ ID NO: 26607 - DNA, 36 bp, synthetic construct; identical to SEQ ID NO: 26597
  misc_feature 1..36: note = Synthetic oligonucleotide
  source 1..36: mol_type = other DNA

SEQ ID NO: 26608 - DNA, 36 bp, synthetic construct; identical to SEQ ID NO: 26597
  misc_feature 1..36: note = Synthetic oligonucleotide
  source 1..36: mol_type = other DNA

SEQ ID NO: 26609 - DNA, 36 bp, synthetic construct
  misc_feature 1..36: note = Synthetic oligonucleotide
  source 1..36: mol_type = other DNA
gctgtagttcgcagggaatcgtcgctcggatacact

SEQ ID NO: 26610 - DNA, 36 bp, synthetic construct
  misc_feature 1..36: note = Synthetic oligonucleotide
  source 1..36: mol_type = other DNA
gctgtagttggtagggaatccccgctcaggtatact

SEQ ID NO: 26611 - DNA, 36 bp, synthetic construct; identical to SEQ ID NO: 26610
  misc_feature 1..36: note = Synthetic oligonucleotide
  source 1..36: mol_type = other DNA

SEQ ID NO: 26612 - DNA, 36 bp, synthetic construct; identical to SEQ ID NO: 26610
  misc_feature 1..36: note = Synthetic oligonucleotide
  source 1..36: mol_type = other DNA

SEQ ID NO: 26613 - DNA, 36 bp, synthetic construct; identical to SEQ ID NO: 26610
  misc_feature 1..36: note = Synthetic oligonucleotide
  source 1..36: mol_type = other DNA

SEQ ID NO: 26614 - DNA, 36 bp, synthetic construct; identical to SEQ ID NO: 12055
  misc_feature 1..36: note = Synthetic oligonucleotide
  source 1..36: mol_type = other DNA

SEQ ID NO: 26615 - DNA, 36 bp, synthetic construct; identical to SEQ ID NO: 12057
  misc_feature 1..36: note = Synthetic oligonucleotide
  source 1..36: mol_type = other DNA

SEQ ID NO: 26616 - DNA, 36 bp, synthetic construct
  misc_feature 1..36: note = Synthetic oligonucleotide
  source 1..36: mol_type = other DNA
gctgtatcctatagtacaaaagtaataaaaagtaag

SEQ ID NO: 26617 - DNA, 31 bp, synthetic construct; identical to SEQ ID NO: 12060
  misc_feature 1..31: note = Synthetic oligonucleotide
  source 1..31: mol_type = other DNA

SEQ ID NO: 26618 - DNA, 26 bp, synthetic construct
  misc_feature 1..26: note = Synthetic oligonucleotide
  source 1..26: mol_type = other DNA
gctgtattagcaagtgtgaaggtacg

SEQ ID NO: 26619 - DNA, 38 bp, synthetic construct
  misc_feature 1..38: note = Synthetic oligonucleotide
  source 1..38: mol_type = other DNA
gctgtattagcaagtgtgaaggtacgaaatctgaaagc

SEQ ID NO: 26620 - DNA, 27 bp, synthetic construct
  misc_feature 1..27: note = Synthetic oligonucleotide
  source 1..27: mol_type = other DNA
gctgtattcaatatgacaaagatataa

SEQ ID NO: 26621 - DNA, 32 bp, synthetic construct
  misc_feature 1..32: note = Synthetic oligonucleotide
  source 1..32: mol_type = other DNA
gctgtattcaatggttcaaagatactaatttg

SEQ ID NO: 26622 - DNA, 32 bp, synthetic construct; identical to SEQ ID NO: 26621
  misc_feature 1..32: note = Synthetic oligonucleotide
  source 1..32: mol_type = other DNA

SEQ ID NO: 26623 - DNA, 32 bp, synthetic construct; identical to SEQ ID NO: 26621
  misc_feature 1..32: note = Synthetic oligonucleotide
  source 1..32: mol_type = other DNA

SEQ ID NO: 26624 - DNA, 36 bp, synthetic construct
  misc_feature 1..36: note = Synthetic oligonucleotide
  source 1..36: mol_type = other DNA
gctgtattcaatggttcaaagatactaatttgaaag

SEQ ID NO: 26625 - DNA, 28 bp, synthetic construct
  misc_feature 1..28: note = Synthetic oligonucleotide
  source 1..28: mol_type = other DNA
gctgtattcgatatgtcaaagatacaat

SEQ ID NO: 26626 - DNA, 25 bp, synthetic construct
  misc_feature 1..25: note = Synthetic oligonucleotide
  source 1..25: mol_type = other DNA
gctgtatttaatatgtcaaagatac

SEQ ID NO: 26627 - DNA, 28 bp, synthetic construct
  misc_feature 1..28: note = Synthetic oligonucleotide
  source 1..28: mol_type = other DNA
gctgtatttaatatgtcaaagatacaaa

SEQ ID NO: 26628 - DNA, 31 bp, synthetic construct
  misc_feature 1..31: note = Synthetic oligonucleotide
  source 1..31: mol_type = other DNA
gctgtatttaatatgtcaaagatacaaactt

SEQ ID NO: 26629 - DNA, 31 bp, synthetic construct; identical to SEQ ID NO: 26628
  misc_feature 1..31: note = Synthetic oligonucleotide
  source 1..31: mol_type = other DNA

SEQ ID NO: 26630 - DNA, 35 bp, synthetic construct
  misc_feature 1..35: note = Synthetic oligonucleotide
  source 1..35: mol_type = other DNA
gctgtatttaatatgtcaaagatacaaatttgaaa

SEQ ID NO: 26631 - DNA, 28 bp, synthetic construct
  misc_feature 1..28: note = Synthetic oligonucleotide
  source 1..28: mol_type = other DNA
gctgtatttaatgtgtcaaagatacaaa

SEQ ID NO: 26632 - DNA, 38 bp, synthetic construct
  misc_feature 1..38: note = Synthetic oligonucleotide
  source 1..38: mol_type = other DNA
gctgtcgcagatactgcaaaggtaagaatttgaaagca

SEQ ID NO: 26633 - DNA, 36 bp, synthetic construct
  misc_feature 1..36: note = Synthetic oligonucleotide
  source 1..36: mol_type = other DNA
gctgtcggcaaatctacgttgtcgccaatccgcaac

SEQ ID NO: 26634 - DNA, 36 bp, synthetic construct; identical to SEQ ID NO: 26633
  misc_feature 1..36: note = Synthetic oligonucleotide
  source 1..36: mol_type = other DNA

SEQ ID NO: 26635 - DNA, 36 bp, synthetic construct
  misc_feature 1..36: note = Synthetic oligonucleotide
  source 1..36: mol_type = other DNA
gctgtgaactgccgcgaagcgtcgctcagatagact

SEQ ID NO: 26636 - DNA, 36 bp, synthetic construct; identical to SEQ ID NO: 26635
  misc_feature 1..36: note = Synthetic oligonucleotide
  source 1..36: mol_type = other DNA

SEQ ID NO: 26637 - DNA, 36 bp, synthetic construct
  misc_feature 1..36: note = Synthetic oligonucleotide
  source 1..36: mol_type = other DNA
gctgtgatgtatccacaaagttaaagaatttgaaag

SEQ ID NO: 26638 - DNA, 37 bp, synthetic construct
  misc_feature 1..37: note = Synthetic oligonucleotide
  source 1..37: mol_type = other DNA
gctgtgatgtatccacaaagttaaagaatttgaaagc

SEQ ID NO: 26639 - DNA, 32 bp, synthetic construct
  misc_feature 1..32: note = Synthetic oligonucleotide
  source 1..32: mol_type = other DNA
gctgtgattagctttcagatttcgtaccttca

SEQ ID NO: 26640 - DNA, 36 bp, synthetic construct
  misc_feature 1..36: note = Synthetic oligonucleotide
  source 1..36: mol_type = other DNA
gctgtgattgaccgggaatcgccgttcagatacatt

SEQ ID NO: 26641 - DNA, 36 bp, synthetic construct
  misc_feature 1..36: note = Synthetic oligonucleotide
  source 1..36: mol_type = other DNA
gctgtgattgatcacacaaaaatacaaaatgaaagc

SEQ ID NO: 26642 - DNA, 36 bp, synthetic construct
  misc_feature 1..36: note = Synthetic oligonucleotide
  source 1..36: mol_type = other DNA
gctgtgattggcggtcagggggcgctcagatacact

SEQ ID NO: 26643 - DNA, 31 bp, synthetic construct
  misc_feature 1..31: note = Synthetic oligonucleotide
  source 1..31: mol_type = other DNA
gctgtgatttacctaggaaagtaacattttg

SEQ ID NO: 26644 - DNA, 31 bp, synthetic construct; identical to SEQ ID NO: 26643
  misc_feature 1..31: note = Synthetic oligonucleotide
  source 1..31: mol_type = other DNA

SEQ ID NO: 26645 - DNA, 20 bp, synthetic construct
  misc_feature 1..20: note = Synthetic oligonucleotide
  source 1..20: mol_type = other DNA
gctgtgatttacggtcaatc

SEQ ID NO: 26646 - DNA, 36 bp, synthetic construct
  misc_feature 1..36: note = Synthetic oligonucleotide
  source 1..36: mol_type = other DNA
gctgtgatttgaagactaaacggtatttacgatatt

SEQ ID NO: 26647 - DNA, 37 bp, synthetic construct
  misc_feature 1..37: note = Synthetic oligonucleotide
  source 1..37: mol_type = other DNA
gctgtgatttgatgtaaatacttgataagatataccc

SEQ ID NO: 26648 - DNA, 36 bp, synthetic construct
  misc_feature 1..36: note = Synthetic oligonucleotide
  source 1..36: mol_type = other DNA
gctgtgatttgcagggaagcatcgtttggttacact

SEQ ID NO: 26649 - DNA, 36 bp, synthetic construct
  misc_feature 1..36: note = Synthetic oligonucleotide
  source 1..36: mol_type = other DNA
gctgtggatgacgggcaatcgccgcttaagtacact

SEQ ID NO: 26650 - DNA, 36 bp, synthetic construct; identical to SEQ ID NO: 12106
  misc_feature 1..36: note = Synthetic oligonucleotide
  source 1..36: mol_type = other DNA

SEQ ID NO: 26651 - DNA, 35 bp, synthetic construct
  misc_feature 1..35: note = Synthetic oligonucleotide
  source 1..35: mol_type = other DNA
gctgtggattgacaccagcacagatctttgacagc

SEQ ID NO: 26652 - DNA, 36 bp, synthetic construct; identical to SEQ ID NO: 12107
  misc_feature 1..36: note = Synthetic oligonucleotide
  source 1..36: mol_type = other DNA

SEQ ID NO: 26653 - DNA, 36 bp, synthetic construct
  misc_feature 1..36: note = Synthetic oligonucleotide
  source 1..36: mol_type = other DNA
gctgtggcccgcggacagtcgccgctcagatacact

SEQ ID NO: 26654 - DNA, 36 bp, synthetic construct
  misc_feature 1..36: note = Synthetic oligonucleotide
  source 1..36: mol_type = other DNA
gctgtggctgacggggaaccgccgttggggtacaac

SEQ ID NO: 26655 - DNA, 36 bp, synthetic construct; identical to SEQ ID NO: 12114
  misc_feature 1..36: note = Synthetic oligonucleotide
  source 1..36: mol_type = other DNA

SEQ ID NO: 26656 - DNA, 36 bp, synthetic construct
  misc_feature 1..36: note = Synthetic oligonucleotide
  source 1..36: mol_type = other DNA
gctgtggcttgaagggactcgtcgctctgatacact

SEQ ID NO: 26657 - DNA, 36 bp, synthetic construct
  misc_feature 1..36: note = Synthetic oligonucleotide
  source 1..36: mol_type = other DNA
gctgtggcttgacgggaatcggcgctttgatacact

SEQ ID NO: 26658 - DNA, 36 bp, synthetic construct
  misc_feature 1..36: note = Synthetic oligonucleotide
  source 1..36: mol_type = other DNA
gctgtggcttgactagaaacacggtataagtacaat

SEQ ID NO: 26659 - DNA, 36 bp, synthetic construct
  misc_feature 1..36: note = Synthetic oligonucleotide
  source 1..36: mol_type = other DNA
gctgtggcttgcagggaatcgtcgctcggatacact

SEQ ID NO: 26660 - DNA, 36 bp, synthetic construct; identical to SEQ ID NO: 12122
  misc_feature 1..36: note = Synthetic oligonucleotide
  source 1..36: mol_type = other DNA

SEQ ID NO: 26661 - DNA, 36 bp, synthetic construct
  misc_feature 1..36: note = Synthetic oligonucleotide
  source 1..36: mol_type = other DNA
gctgtggcttgccgggaatcgccgctcaggtacact

SEQ ID NO: 26662 - DNA, 36 bp, synthetic construct
  misc_feature 1..36: note = Synthetic oligonucleotide
  source 1..36: mol_type = other DNA
gctgtggcttgcggccaaccgccgctcggatacact

SEQ ID NO: 26663 - DNA, 36 bp, synthetic construct; identical to SEQ ID NO: 12126
  misc_feature 1..36: note = Synthetic oligonucleotide
  source 1..36: mol_type = other DNA

SEQ ID NO: 26664 - DNA, 36 bp, synthetic construct; identical to SEQ ID NO: 12129
  misc_feature 1..36: note = Synthetic oligonucleotide
  source 1..36: mol_type = other DNA

SEQ ID NO: 26665 - DNA, 36 bp, synthetic construct
  misc_feature 1..36: note = Synthetic oligonucleotide
  source 1..36: mol_type = other DNA
gctgtggtcggcacccaaccgtcgctcgagtacact

SEQ ID NO: 26666 - DNA, 36 bp, synthetic construct
  misc_feature 1..36: note = Synthetic oligonucleotide
  source 1..36: mol_type = other DNA
gctgtggtcggcagggaatcgtcgctcggatacact

SEQ ID NO: 26667 - DNA, 36 bp, synthetic construct
  misc_feature 1..36: note = Synthetic oligonucleotide
  source 1..36: mol_type = other DNA
gctgtggtctgccgcaaacgaacggatcgatacacc

SEQ ID NO: 26668 - DNA, 36 bp, synthetic construct
  misc_feature 1..36: note = Synthetic oligonucleotide
  source 1..36: mol_type = other DNA
gctgtggtgtcaggggaaccatcgctcaggtatact

SEQ ID NO: 26669 - DNA, 34 bp, synthetic construct
  misc_feature 1..34: note = Synthetic oligonucleotide
  source 1..34: mol_type = other DNA
gctgtggttcctatgtcaaagatacaatctgaaa

SEQ ID NO: 26670 - DNA, 36 bp, synthetic construct
  misc_feature 1..36: note = Synthetic oligonucleotide
  source 1..36: mol_type = other DNA
gctgtggttcgcggggaatcgccgttcggatacact

SEQ ID NO: 26671 - DNA, 36 bp, synthetic construct
  misc_feature 1..36: note = Synthetic oligonucleotide
  source 1..36: mol_type = other DNA
gctgtggttgaaggaaaaccgttacttgagtacact

SEQ ID NO: 26672 - DNA, 36 bp, synthetic construct; identical to SEQ ID NO: 12134
  misc_feature 1..36: note = Synthetic oligonucleotide
  source 1..36: mol_type = other DNA

SEQ ID NO: 26673 - DNA, 36 bp, synthetic construct; identical to SEQ ID NO: 12135
  misc_feature 1..36: note = Synthetic oligonucleotide
  source 1..36: mol_type = other DNA

SEQ ID NO: 26674 - DNA, 36 bp, synthetic construct
  misc_feature 1..36: note = Synthetic oligonucleotide
  source 1..36: mol_type = other DNA
gctgtggttggccgggaaacgccgctcgggtacaat

SEQ ID NO: 26675 - DNA, 36 bp, synthetic construct
  misc_feature 1..36: note = Synthetic oligonucleotide
  source 1..36: mol_type = other DNA
gctgtggtttgacaggaaagaaaggttctctaaaat

SEQ ID NO: 26676 - DNA, 36 bp, synthetic construct; identical to SEQ ID NO: 12145
  misc_feature 1..36: note = Synthetic oligonucleotide
  source 1..36: mol_type = other DNA

SEQ ID NO: 26677 - DNA, 36 bp, synthetic construct; identical to SEQ ID NO: 12146
  misc_feature 1..36: note = Synthetic oligonucleotide
  source 1..36: mol_type = other DNA

SEQ ID NO: 26678 - DNA, 36 bp, synthetic construct
  misc_feature 1..36: note = Synthetic oligonucleotide
  source 1..36: mol_type = other DNA
gctgtggtttggggagaatctccgctcaggtatact

SEQ ID NO: 26679 - DNA, 36 bp, synthetic construct; identical to SEQ ID NO: 12149
  misc_feature 1..36: note = Synthetic oligonucleotide
  source 1..36: mol_type = other DNA

SEQ ID NO: 26680 - DNA, 36 bp, synthetic construct
  misc_feature 1..36: note = Synthetic oligonucleotide
  source 1..36: mol_type = other DNA
gctgttcccaatggttcaaagatactaatttgaaag

SEQ ID NO: 26681 - DNA, 34 bp, synthetic construct
  misc_feature 1..34: note = Synthetic oligonucleotide
  source 1..34: mol_type = other DNA
gctgttgatgtctctgcaaaggtaatcaattttt

SEQ ID NO: 26682 - DNA, 30 bp, synthetic construct
  misc_feature 1..30: note = Synthetic oligonucleotide
  source 1..30: mol_type = other DNA
gctgttgcttatcctacaaagatactattt

SEQ ID NO: 26683 - DNA, 38 bp, synthetic construct
  misc_feature 1..38: note = Synthetic oligonucleotide
  source 1..38: mol_type = other DNA
gctgtttacaaacttatcaaataacaaaatgaaagcaa

SEQ ID NO: 26684 - DNA, 31 bp, synthetic construct
  misc_feature 1..31: note = Synthetic oligonucleotide
  source 1..31: mol_type = other DNA
gctgtttccaatggatcaaagatactaattt

SEQ ID NO: 26685 - DNA, 31 bp, synthetic construct; identical to SEQ ID NO: 26684
  misc_feature 1..31: note = Synthetic oligonucleotide
  source 1..31: mol_type = other DNA

SEQ ID NO: 26686 - DNA, 31 bp, synthetic construct; identical to SEQ ID NO: 26684
  misc_feature 1..31: note = Synthetic oligonucleotide
  source 1..31: mol_type = other DNA

SEQ ID NO: 26687 - DNA, 31 bp, synthetic construct
  misc_feature 1..31: note = Synthetic oligonucleotide
  source 1..31: mol_type = other DNA
gctgtttccaatggatcaaagatagaaattt

SEQ ID NO: 26688 - DNA, 30 bp, synthetic construct
  misc_feature 1..30: note = Synthetic oligonucleotide
  source 1..30: mol_type = other DNA
gctgtttccaatggttcaaagatactaaaa

SEQ ID NO: 26689 - DNA, 30 bp, synthetic construct; identical to SEQ ID NO: 26688
  misc_feature 1..30: note = Synthetic oligonucleotide
  source 1..30: mol_type = other DNA

SEQ ID NO: 26690 - DNA, 31 bp, synthetic construct
  misc_feature 1..31: note = Synthetic oligonucleotide
  source 1..31: mol_type = other DNA
gctgtttccaatggttcaaagatactaaaat

SEQ ID NO: 26691 - DNA, 29 bp, synthetic construct
  misc_feature 1..29: note = Synthetic oligonucleotide
  source 1..29: mol_type = other DNA
gctgtttccaatggttcaaagatactaat

SEQ ID NO: 26692 - DNA, 36 bp, synthetic construct
  misc_feature 1..36: note = Synthetic oligonucleotide
  source 1..36: mol_type = other DNA
gctgtttccaatggttcaaagatactaatttgaaag

SEQ ID NO: 26693 - DNA, 36 bp, synthetic construct; identical to SEQ ID NO: 26692
  misc_feature 1..36: note = Synthetic oligonucleotide
  source 1..36: mol_type = other DNA

SEQ ID NO: 26694 - DNA, 36 bp, synthetic construct; identical to SEQ ID NO: 26692
  misc_feature 1..36: note = Synthetic oligonucleotide
  source 1..36: mol_type = other DNA

SEQ ID NO: 26695 - DNA, 36 bp, synthetic construct; identical to SEQ ID NO: 26692
  misc_feature 1..36: note = Synthetic oligonucleotide
  source 1..36: mol_type = other DNA

SEQ ID NO: 26696 - DNA, 36 bp, synthetic construct; identical to SEQ ID NO: 26692
  misc_feature 1..36: note = Synthetic oligonucleotide
  source 1..36: mol_type = other DNA

SEQ ID NO: 26697 - DNA, 36 bp, synthetic construct; identical to SEQ ID NO: 26692
  misc_feature 1..36: note = Synthetic oligonucleotide
  source 1..36: mol_type = other DNA

SEQ ID NO: 26698 - DNA, 35 bp, synthetic construct
  misc_feature 1..35: note = Synthetic oligonucleotide
  source 1..35: mol_type = other DNA
gctgtttcctatataacaaagttactaaattgaaa

SEQ ID NO: 26699 - DNA, 30 bp, synthetic construct
  misc_feature 1..30: note = Synthetic oligonucleotide
  source 1..30: mol_type = other DNA
gctgtttctaatggttcaaagatactaaaa

SEQ ID NO: 26700 - DNA, 36 bp, synthetic construct
  misc_feature 1..36: note = Synthetic oligonucleotide
  source 1..36: mol_type = other DNA
gctgtttctaatggttcaaatatactaaaatgaaag

SEQ ID NO: 26701 - DNA, 36 bp, synthetic construct; identical to SEQ ID NO: 26700
  misc_feature 1..36: note = Synthetic oligonucleotide
  source 1..36: mol_type = other DNA

SEQ ID NO: 26702 - DNA, 36 bp, synthetic construct; identical to SEQ ID NO: 26700
  misc_feature 1..36: note = Synthetic oligonucleotide
  source 1..36: mol_type = other DNA

SEQ ID NO: 26703 - DNA, 35 bp, synthetic construct
  misc_feature 1..35: note = Synthetic oligonucleotide
  source 1..35: mol_type = other DNA
gctgtttgccataggacaaaattactaatttgaaa

SEQ ID NO: 26704 - DNA, 34 bp, synthetic construct
  misc_feature 1..34: note = Synthetic oligonucleotide
  source 1..34: mol_type = other DNA
gctgtttttaaaaatatcaaataacaattagaaa

SEQ ID NO: 26705 - DNA, 37 bp, synthetic construct
  misc_feature 1..37: note = Synthetic oligonucleotide
  source 1..37: mol_type = other DNA
gctgtttttaatggtgcaaatgtactaatttgaaagc

SEQ ID NO: 26706 - DNA, 38 bp, synthetic construct
  misc_feature 1..38: note = Synthetic oligonucleotide
  source 1..38: mol_type = other DNA
gctgtttttcccgcgtcaaagatacaattttgaaagca

SEQ ID NO: 26707 - DNA, 37 bp, synthetic construct
  misc_feature 1..37: note = Synthetic oligonucleotide
  source 1..37: mol_type = other DNA
gcttacaggattgccccggtgggggcacgatcaaaac

SEQ ID NO: 26708 - DNA, 36 bp, synthetic construct
  misc_feature 1..36: note = Synthetic oligonucleotide
  source 1..36: mol_type = other DNA
gcttacggaaggagagagttcgagagtgtcgtcaat

SEQ ID NO: 26709 - DNA, 36 bp, synthetic construct; identical to SEQ ID NO: 26708
  misc_feature 1..36: note = Synthetic oligonucleotide
  source 1..36: mol_type = other DNA

SEQ ID NO: 26710 - DNA, 36 bp, synthetic construct; identical to SEQ ID NO: 12194
  misc_feature 1..36: note = Synthetic oligonucleotide
  source 1..36: mol_type = other DNA

SEQ ID NO: 26711 - DNA, 36 bp, synthetic construct
  misc_feature 1..36: note = Synthetic oligonucleotide
  source 1..36: mol_type = other DNA
gcttagttgctttattgatttacaaggttctcaaac

SEQ ID NO: 26712 - DNA, 36 bp, synthetic construct; identical to SEQ ID NO: 26711
  misc_feature 1..36: note = Synthetic oligonucleotide
  source 1..36: mol_type = other DNA

SEQ ID NO: 26713 - DNA, 37 bp, synthetic construct
  misc_feature 1..37: note = Synthetic oligonucleotide
  source 1..37: mol_type = other DNA
gcttcaatctcttttatcaaagaaccctaactgtaac

SEQ ID NO: 26714 - DNA, 36 bp, synthetic construct
  misc_feature 1..36: note = Synthetic oligonucleotide
  source 1..36: mol_type = other DNA
gcttcaatggggccgcgctcgtgcgagcgcggaaat

SEQ ID NO: 26715 - DNA, 31 bp, synthetic construct
  misc_feature 1..31: note = Synthetic oligonucleotide
  source 1..31: mol_type = other DNA
gcttcaattcctataaaggaacaattgttat

SEQ ID NO: 26716 - DNA, 36 bp, synthetic construct; identical to SEQ ID NO: 12200
  misc_feature 1..36: note = Synthetic oligonucleotide
  source 1..36: mol_type = other DNA

SEQ ID NO: 26717 - DNA, 25 bp, synthetic construct
  misc_feature 1..25: note = Synthetic oligonucleotide
  source 1..25: mol_type = other DNA
gcttcgtaggtaccgcgcttcgagc

SEQ ID NO: 26718 - DNA, 36 bp, synthetic construct
  misc_feature 1..36: note = Synthetic oligonucleotide
  source 1..36: mol_type = other DNA
gcttcgtaggtaccgcgcttcgagctgctacttacc

SEQ ID NO: 26719 - DNA, 36 bp, synthetic construct; identical to SEQ ID NO: 12202
  misc_feature 1..36: note = Synthetic oligonucleotide
  source 1..36: mol_type = other DNA

SEQ ID NO: 26720 - DNA, 23 bp, synthetic construct
  misc_feature 1..23: note = Synthetic oligonucleotide
  source 1..23: mol_type = other DNA
gcttgacacctttacgaatttac

SEQ ID NO: 26721 - DNA, 36 bp, synthetic construct
  misc_feature 1..36: note = Synthetic oligonucleotide
  source 1..36: mol_type = other DNA
gcttgaccactatcagaaactacacggcgctcaaac

SEQ ID NO: 26722 - DNA, 36 bp, synthetic construct; identical to SEQ ID NO: 12205
  misc_feature 1..36: note = Synthetic oligonucleotide
  source 1..36: mol_type = other DNA

SEQ ID NO: 26723 - DNA, 36 bp, synthetic construct
  misc_feature 1..36: note = Synthetic oligonucleotide
  source 1..36: mol_type = other DNA
gcttgagcaccatacatttctacatcattctcaaac

SEQ ID NO: 26724 - DNA, 36 bp, synthetic construct; identical to SEQ ID NO: 12209
  misc_feature 1..36: note = Synthetic oligonucleotide
  source 1..36: mol_type = other DNA

SEQ ID NO: 26725 - DNA, 36 bp, synthetic construct; identical to SEQ ID NO: 12209
  misc_feature 1..36: note = Synthetic oligonucleotide
  source 1..36: mol_type = other DNA

SEQ ID NO: 26726 - DNA, 36 bp, synthetic construct; identical to SEQ ID NO: 12209
  misc_feature 1..36: note = Synthetic oligonucleotide
  source 1..36: mol_type = other DNA

SEQ ID NO: 26727 - DNA, 36 bp, synthetic construct
  misc_feature 1..36: note = Synthetic oligonucleotide
  source 1..36: mol_type = other DNA
gcttgagtaccatactaatttacatcattctcaaac

SEQ ID NO: 26728 - DNA, 36 bp, synthetic construct
  misc_feature 1..36: note = Synthetic oligonucleotide
  source 1..36: mol_type = other DNA
gcttgattaccctatagaattacaccactctcaaac

SEQ ID NO: 26729 - DNA, 36 bp, synthetic construct
  misc_feature 1..36: note = Synthetic oligonucleotide
  source 1..36: mol_type = other DNA
gcttgattaccctatagaattacactactctcaaac

SEQ ID NO: 26730 - DNA, 36 bp, synthetic construct
  misc_feature 1..36: note = Synthetic oligonucleotide
  source 1..36: mol_type = other DNA
gcttgattcccatatgaaattacagcattctcaaac

SEQ ID NO: 26731 - DNA, 36 bp, synthetic construct
  misc_feature 1..36: note = Synthetic oligonucleotide
  source 1..36: mol_type = other DNA
gcttgattcccatatgaaattacatcattctcaaac

SEQ ID NO: 26732 - DNA, 36 bp, synthetic construct
  misc_feature 1..36: note = Synthetic oligonucleotide
  source 1..36: mol_type = other DNA
gcttgggctggccggaaatcaccgctttgatacact

SEQ ID NO: 26733 - DNA, 36 bp, synthetic construct
  misc_feature 1..36: note = Synthetic oligonucleotide
  source 1..36: mol_type = other DNA
gcttgtgtaccatacatttttacatcattctcaaac

SEQ ID NO: 26734 - DNA, 36 bp, synthetic construct; identical to SEQ ID NO: 26733
  misc_feature 1..36: note = Synthetic oligonucleotide
  source 1..36: mol_type = other DNA

SEQ ID NO: 26735 - DNA, 36 bp, synthetic construct; identical to SEQ ID NO: 26733
  misc_feature 1..36: note = Synthetic oligonucleotide
  source 1..36: mol_type = other DNA

SEQ ID NO: 26736 - DNA, 36 bp, synthetic construct
  misc_feature 1..36: note = Synthetic oligonucleotide
  source 1..36: mol_type = other DNA
gcttgtttaccatacaaaattacacacctctcaaac

SEQ ID NO: 26737 - DNA, 36 bp, synthetic construct
  misc_feature 1..36: note = Synthetic oligonucleotide
  source 1..36: mol_type = other DNA
gcttgtttaccatacaaaattacatacttctcaaac

SEQ ID NO: 26738 - DNA, 36 bp, synthetic construct; identical to SEQ ID NO: 26737
  misc_feature 1..36: note = Synthetic oligonucleotide
  source 1..36: mol_type = other DNA

SEQ ID NO: 26739 - DNA, 36 bp, synthetic construct; identical to SEQ ID NO: 12216
  misc_feature 1..36: note = Synthetic oligonucleotide
  source 1..36: mol_type = other DNA

SEQ ID NO: 26740 - DNA, 36 bp, synthetic construct; identical to SEQ ID NO: 12216
  misc_feature 1..36: note = Synthetic oligonucleotide
  source 1..36: mol_type = other DNA

SEQ ID NO: 26741 - DNA, 36 bp, synthetic construct; identical to SEQ ID NO: 12216
  misc_feature 1..36: note = Synthetic oligonucleotide
  source 1..36: mol_type = other DNA

SEQ ID NO: 26742 - DNA, 36 bp, synthetic construct
  misc_feature 1..36: note = Synthetic oligonucleotide
  source 1..36: mol_type = other DNA
gctttacacctttatttacttacaaggttctcaaac

SEQ ID NO: 26743 - DNA, 36 bp, synthetic construct; identical to SEQ ID NO: 12217
  misc_feature 1..36: note = Synthetic oligonucleotide
  source 1..36: mol_type = other DNA

SEQ ID NO: 26744 - DNA, 36 bp, synthetic construct
  misc_feature 1..36: note = Synthetic oligonucleotide
  source 1..36: mol_type = other DNA
gctttactaccatataaatttacactactctcaaac

SEQ ID NO: 26745 - DNA, 36 bp, synthetic construct; identical to SEQ ID NO: 26744
  misc_feature 1..36: note = Synthetic oligonucleotide
  source 1..36: mol_type = other DNA

SEQ ID NO: 26746 - DNA, 36 bp, synthetic construct
  misc_feature 1..36: note = Synthetic oligonucleotide
  source 1..36: mol_type = other DNA
gctttagagttttccagaatcacactactctcaaac

SEQ ID NO: 26747 - DNA, 33 bp, synthetic construct
  misc_feature 1..33: note = Synthetic oligonucleotide
  source 1..33: mol_type = other DNA
gctttagatggatgttaaatcaatgatgtaatt

SEQ ID NO: 26748 - DNA, 36 bp, synthetic construct
  misc_feature 1..36: note = Synthetic oligonucleotide
  source 1..36: mol_type = other DNA
gctttagatggatgttaaatcaatgatgtaatttac

SEQ ID NO: 26749 - DNA, 36 bp, synthetic construct; identical to SEQ ID NO: 12218
  misc_feature 1..36: note = Synthetic oligonucleotide
  source 1..36: mol_type = other DNA

SEQ ID NO: 26750 - DNA, 36 bp, synthetic construct; identical to SEQ ID NO: 12218
  misc_feature 1..36: note = Synthetic oligonucleotide
  source 1..36: mol_type = other DNA

SEQ ID NO: 26751 - DNA, 36 bp, synthetic construct
  misc_feature 1..36: note = Synthetic oligonucleotide
  source 1..36: mol_type = other DNA
gctttatacctatctgaattaacaaagctctcaaac

SEQ ID NO: 26752 - DNA, 35 bp, synthetic construct
  misc_feature 1..35: note = Synthetic oligonucleotide
  source 1..35: mol_type = other DNA
gctttcaaattcgtaactttgtgatctcaaacaac

SEQ ID NO: 26753 - DNA, 36 bp, synthetic construct
  misc_feature 1..36: note = Synthetic oligonucleotide
  source 1..36: mol_type = other DNA
gctttcaaattttgtaattttgtgattgataacaac

SEQ ID NO: 26754 - DNA, 38 bp, synthetic construct; identical to SEQ ID NO: 12219
  misc_feature 1..38: note = Synthetic oligonucleotide
  source 1..38: mol_type = other DNA

SEQ ID NO: 26755 - DNA, 36 bp, synthetic construct
  misc_feature 1..36: note = Synthetic oligonucleotide
  source 1..36: mol_type = other DNA
gctttgccatagttcacatttcaaggtaagcaatac

SEQ ID NO: 26756 - DNA, 36 bp, synthetic construct; identical to SEQ ID NO: 12222
  misc_feature 1..36: note = Synthetic oligonucleotide
  source 1..36: mol_type = other DNA

SEQ ID NO: 26757 - DNA, 36 bp, synthetic construct
  misc_feature 1..36: note = Synthetic oligonucleotide
  source 1..36: mol_type = other DNA
gctttgccatagttcagatttcgatgcgagcaaaac

SEQ ID NO: 26758 - DNA, 36 bp, synthetic construct
  misc_feature 1..36: note = Synthetic oligonucleotide
  source 1..36: mol_type = other DNA
gctttgccatagttcagctttcaaaccaagcgaacc

SEQ ID NO: 26759 - DNA, 36 bp, synthetic construct
  misc_feature 1..36: note = Synthetic oligonucleotide
  source 1..36: mol_type = other DNA
gctttgccttgaatccaaagccgggggggacagagt

SEQ ID NO: 26760 - DNA, 36 bp, synthetic construct
  misc_feature 1..36: note = Synthetic oligonucleotide
  source 1..36: mol_type = other DNA
gctttgccttgaatccaatctcgggcagcgcagact

SEQ ID NO: 26761 - DNA, 36 bp, synthetic construct
  misc_feature 1..36: note = Synthetic oligonucleotide
  source 1..36: mol_type = other DNA
gctttgccttgaatcccttttaggggggagcagact

SEQ ID NO: 26762 - DNA, 29 bp, synthetic construct
  misc_feature 1..29: note = Synthetic oligonucleotide
  source 1..29: mol_type = other DNA
gctttgccttgattacaaagccggggggg

SEQ ID NO: 26763 - DNA, 29 bp, synthetic construct
  misc_feature 1..29: note = Synthetic oligonucleotide
  source 1..29: mol_type = other DNA
gctttgccttgattacaaagccggggggg

SEQ ID NO: 26764 - DNA, 36 bp, synthetic construct
  misc_feature 1..36: note = Synthetic oligonucleotide
  source 1..36: mol_type = other DNA
gctttgccttgattcaaaaaccgggggggagaccct

SEQ ID NO: 26765 - DNA, 36 bp, synthetic construct
  misc_feature 1..36: note = Synthetic oligonucleotide
  source 1..36: mol_type = other DNA
gctttgccttgattcaaattccgatggtggcatcct

SEQ ID NO: 26766 - DNA, 36 bp, synthetic construct; identical to SEQ ID NO: 12235
  misc_feature 1..36: note = Synthetic oligonucleotide
  source 1..36: mol_type = other DNA

SEQ ID NO: 26767 - DNA, 37 bp, synthetic construct
  misc_feature 1..37: note = Synthetic oligonucleotide
  source 1..37: mol_type = other DNA
gctttgccttgattccaaaaacgagggcggcaaactc

SEQ ID NO: 26768 - DNA, 36 bp, synthetic construct
  misc_feature 1..36: note = Synthetic oligonucleotide
  source 1..36: mol_type = other DNA
gctttgccttgattccaaaaacggcagaagcaaact

SEQ ID NO: 26769 - DNA, 36 bp, synthetic construct
  misc_feature 1..36: note = Synthetic oligonucleotide
  source 1..36: mol_type = other DNA
gctttgccttgattccaaaaacgggcgcggcaaact

SEQ ID NO: 26770 - DNA, 36 bp, synthetic construct
  misc_feature 1..36: note = Synthetic oligonucleotide
  source 1..36: mol_type = other DNA
gctttgccttgattccaaaaacggggctggcaacat

SEQ ID NO: 26771 - DNA, 36 bp, synthetic construct
  misc_feature 1..36: note = Synthetic oligonucleotide
  source 1..36: mol_type = other DNA
gctttgccttgattccaaaaaggggggtggcaaact

SEQ ID NO: 26772 - DNA, 36 bp, synthetic construct
  misc_feature 1..36: note = Synthetic oligonucleotide
  source 1..36: mol_type = other DNA
gctttgccttgattccaaaaccggggggggcacaat

SEQ ID NO: 26773 - DNA, 36 bp, synthetic construct
  misc_feature 1..36: note = Synthetic oligonucleotide
  source 1..36: mol_type = other DNA
gctttgccttgattccaaaaccgggtagagcaaact

SEQ ID NO: 26774 - DNA, 36 bp, synthetic construct
  misc_feature 1..36: note = Synthetic oligonucleotide
  source 1..36: mol_type = other DNA
gctttgccttgattccaaaactggggcgagcaaact

SEQ ID NO: 26775 - DNA, 36 bp, synthetic construct
  misc_feature 1..36: note = Synthetic oligonucleotide
  source 1..36: mol_type = other DNA
gctttgccttgattccaaaattgggtgatgcaacat

SEQ ID NO: 26776 - DNA, 36 bp, synthetic construct
  misc_feature 1..36: note = Synthetic oligonucleotide
  source 1..36: mol_type = other DNA
gctttgccttgattccaaaccttggcagtgtattct

SEQ ID NO: 26777 - DNA, 36 bp, synthetic construct
  misc_feature 1..36: note = Synthetic oligonucleotide
  source 1..36: mol_type = other DNA
gctttgccttgattccaaatcagatggggctacaat

SEQ ID NO: 26778 - DNA, 36 bp, synthetic construct
  misc_feature 1..36: note = Synthetic oligonucleotide
  source 1..36: mol_type = other DNA
gctttgccttgattccaaatcccggcagtgttaaac

SEQ ID NO: 26779 - DNA, 36 bp, synthetic construct
  misc_feature 1..36: note = Synthetic oligonucleotide
  source 1..36: mol_type = other DNA
gctttgccttgattccaaatccggggggagcagaat

SEQ ID NO: 26780 - DNA, 36 bp, synthetic construct
  misc_feature 1..36: note = Synthetic oligonucleotide
  source 1..36: mol_type = other DNA
gctttgccttgattccaaatccggggggggcagaat

SEQ ID NO: 26781 - DNA, 36 bp, synthetic construct
  misc_feature 1..36: note = Synthetic oligonucleotide
  source 1..36: mol_type = other DNA
gctttgccttgattccaaatctgctctttgcacaat

SEQ ID NO: 26782 - DNA, 36 bp, synthetic construct; identical to SEQ ID NO: 26781
  misc_feature 1..36: note = Synthetic oligonucleotide
  source 1..36: mol_type = other DNA

SEQ ID NO: 26783 - DNA, 36 bp, synthetic construct; identical to SEQ ID NO: 26781
  misc_feature 1..36: note = Synthetic oligonucleotide
  source 1..36: mol_type = other DNA

SEQ ID NO: 26784 - DNA, 36 bp, synthetic construct; identical to SEQ ID NO: 26781
  misc_feature 1..36: note = Synthetic oligonucleotide
  source 1..36: mol_type = other DNA

SEQ ID NO: 26785 - DNA, 36 bp, synthetic construct; identical to SEQ ID NO: 26781
  misc_feature 1..36: note = Synthetic oligonucleotide
  source 1..36: mol_type = other DNA

SEQ ID NO: 26786 - DNA, 36 bp, synthetic construct; identical to SEQ ID NO: 12244
  misc_feature 1..36: note = Synthetic oligonucleotide
  source 1..36: mol_type = other DNA

SEQ ID NO: 26787 - DNA, 30 bp, synthetic construct
  misc_feature 1..30: note = Synthetic oligonucleotide
  source 1..30: mol_type = other DNA
gctttgccttgattccaaattcagtgcgag

SEQ ID NO: 26788 - DNA, 37 bp, synthetic construct; identical to SEQ ID NO: 12246
  misc_feature 1..37: note = Synthetic oligonucleotide
  source 1..37: mol_type = other DNA

SEQ ID NO: 26789 - DNA, 36 bp, synthetic construct
  misc_feature 1..36: note = Synthetic oligonucleotide
  source 1..36: mol_type = other DNA
gctttgccttgattccaaattctgaggggggacaat

SEQ ID NO: 26790 - DNA, 36 bp, synthetic construct
  misc_feature 1..36: note = Synthetic oligonucleotide
  source 1..36: mol_type = other DNA
gctttgccttgattccaaattttagatgggcaaact

SEQ ID NO: 26791 - DNA, 36 bp, synthetic construct; identical to SEQ ID NO: 12248
  misc_feature 1..36: note = Synthetic oligonucleotide
  source 1..36: mol_type = other DNA

SEQ ID NO: 26792 - DNA, 36 bp, synthetic construct
  misc_feature 1..36: note = Synthetic oligonucleotide
  source 1..36: mol_type = other DNA
gctttgccttgattccaatgacggggggagcagaat

SEQ ID NO: 26793 - DNA, 36 bp, synthetic construct
  misc_feature 1..36: note = Synthetic oligonucleotide
  source 1..36: mol_type = other DNA
gctttgccttgattccaattattaggcagacaaaat

SEQ ID NO: 26794 - DNA, 36 bp, synthetic construct; identical to SEQ ID NO: 12251
  misc_feature 1..36: note = Synthetic oligonucleotide
  source 1..36: mol_type = other DNA

SEQ ID NO: 26795 - DNA, 36 bp, synthetic construct
  misc_feature 1..36: note = Synthetic oligonucleotide
  source 1..36: mol_type = other DNA
gctttgccttgattccaattccggcggcggcaacgt

SEQ ID NO: 26796 - DNA, 37 bp, synthetic construct
  misc_feature 1..37: note = Synthetic oligonucleotide
  source 1..37: mol_type = other DNA
gctttgccttgattccaattccggggcgcagaggctc

SEQ ID NO: 26797 - DNA, 37 bp, synthetic construct
  misc_feature 1..37: note = Synthetic oligonucleotide
  source 1..37: mol_type = other DNA
gctttgccttgattccaattcctcggcggggagcatc

SEQ ID NO: 26798 - DNA, 37 bp, synthetic construct
  misc_feature 1..37: note = Synthetic oligonucleotide
  source 1..37: mol_type = other DNA
gctttgccttgattccaattccttggggcagacactc

SEQ ID NO: 26799 - DNA, 36 bp, synthetic construct
  misc_feature 1..36: note = Synthetic oligonucleotide
  source 1..36: mol_type = other DNA
gctttgccttgattccaattcttaggcagacaaaat

SEQ ID NO: 26800 - DNA, 36 bp, synthetic construct; identical to SEQ ID NO: 26799
  misc_feature 1..36: note = Synthetic oligonucleotide
  source 1..36: mol_type = other DNA

SEQ ID NO: 26801 - DNA, 36 bp, synthetic construct; identical to SEQ ID NO: 26799
  misc_feature 1..36: note = Synthetic oligonucleotide
  source 1..36: mol_type = other DNA

SEQ ID NO: 26802 - DNA, 36 bp, synthetic construct; identical to SEQ ID NO: 12257
  misc_feature 1..36: note = Synthetic oligonucleotide
  source 1..36: mol_type = other DNA

SEQ ID NO: 26803 - DNA, 36 bp, synthetic construct; identical to SEQ ID NO: 12257
  misc_feature 1..36: note = Synthetic oligonucleotide
  source 1..36: mol_type = other DNA

SEQ ID NO: 26804 - DNA, 37 bp, synthetic construct; identical to SEQ ID NO: 12258
  misc_feature 1..37: note = Synthetic oligonucleotide
  source 1..37: mol_type = other DNA

SEQ ID NO: 26805 - DNA, 36 bp, synthetic construct
  misc_feature 1..36: note = Synthetic oligonucleotide
  source 1..36: mol_type = other DNA
gctttgccttgattccactcttgggtagagcagact

SEQ ID NO: 26806 - DNA, 36 bp, synthetic construct
  misc_feature 1..36: note = Synthetic oligonucleotide
  source 1..36: mol_type = other DNA
gctttgccttgattccacttccgaggcgtggagact

SEQ ID NO: 26807 - DNA, 36 bp, synthetic construct; identical to SEQ ID NO: 12260
  misc_feature 1..36: note = Synthetic oligonucleotide
  source 1..36: mol_type = other DNA

SEQ ID NO: 26808 - DNA, 36 bp, synthetic construct
  misc_feature 1..36: note = Synthetic oligonucleotide
  source 1..36: mol_type = other DNA
gctttgccttgattccacttcttagcagagcatact

SEQ ID NO: 26809 - DNA, 36 bp, synthetic construct
  misc_feature 1..36: note = Synthetic oligonucleotide
  source 1..36: mol_type = other DNA
gctttgccttgattcctaaatcggcgggggcatact

SEQ ID NO: 26810 - DNA, 36 bp, synthetic construct; identical to SEQ ID NO: 26809
  misc_feature 1..36: note = Synthetic oligonucleotide
  source 1..36: mol_type = other DNA

SEQ ID NO: 26811 - DNA, 36 bp, synthetic construct; identical to SEQ ID NO: 26809
  misc_feature 1..36: note = Synthetic oligonucleotide
  source 1..36: mol_type = other DNA

SEQ ID NO: 26812 - DNA, 36 bp, synthetic construct
  misc_feature 1..36: note = Synthetic oligonucleotide
  source 1..36: mol_type = other DNA
gctttgccttgattcctttttttcttttggcaaaat

SEQ ID NO: 26813 - DNA, 36 bp, synthetic construct
  misc_feature 1..36: note = Synthetic oligonucleotide
  source 1..36: mol_type = other DNA
gctttgccttggttccaaacaagaggctggtaaggt

SEQ ID NO: 26814 - DNA, 38 bp, synthetic construct; identical to SEQ ID NO: 12268
  misc_feature 1..38: note = Synthetic oligonucleotide
  source 1..38: mol_type = other DNA

SEQ ID NO: 26815 - DNA, 36 bp, synthetic construct
  misc_feature 1..36: note = Synthetic oligonucleotide
  source 1..36: mol_type = other DNA
gctttggaaccataaaaaattacatacctttcaaac

SEQ ID NO: 26816 - DNA, 37 bp, synthetic construct
  misc_feature 1..37: note = Synthetic oligonucleotide
  source 1..37: mol_type = other DNA
gctttggatggccgggaatcgcggctttgatagactt

SEQ ID NO: 26817 - DNA, 37 bp, synthetic construct
  misc_feature 1..37: note = Synthetic oligonucleotide
  source 1..37: mol_type = other DNA
gctttggatggccggggatcgcggctttggtagactc

SEQ ID NO: 26818 - DNA, 37 bp, synthetic construct; identical to SEQ ID NO: 12272
  misc_feature 1..37: note = Synthetic oligonucleotide
  source 1..37: mol_type = other DNA

SEQ ID NO: 26819 - DNA, 36 bp, synthetic construct
  misc_feature 1..36: note = Synthetic oligonucleotide
  source 1..36: mol_type = other DNA
gctttggtcgggatccatccgccgctcgagtacact

SEQ ID NO: 26820 - DNA, 36 bp, synthetic construct; identical to SEQ ID NO: 12273
  misc_feature 1..36: note = Synthetic oligonucleotide
  source 1..36: mol_type = other DNA

SEQ ID NO: 26821 - DNA, 28 bp, synthetic construct
  misc_feature 1..28: note = Synthetic oligonucleotide
  source 1..28: mol_type = other DNA
gcttttaaagatcagtccaacaacagca

SEQ ID NO: 26822 - DNA, 19 bp, synthetic construct
  misc_feature 1..19: note = Synthetic oligonucleotide
  source 1..19: mol_type = other DNA
ggaaatcggtagggaagcc

SEQ ID NO: 26823 - DNA, 19 bp, synthetic construct
  misc_feature 1..19: note = Synthetic oligonucleotide
  source 1..19: mol_type = other DNA
ggaaatcggtagggaagcc

SEQ ID NO: 26824 - DNA, 19 bp, synthetic construct
  misc_feature 1..19: note = Synthetic oligonucleotide
  source 1..19: mol_type = other DNA
ggaaatcggtagggaagcc

SEQ ID NO: 26825 - DNA, 19 bp, synthetic construct
  misc_feature 1..19: note = Synthetic oligonucleotide
  source 1..19: mol_type = other DNA
ggaaatcggtagggaagcc

SEQ ID NO: 26826 - DNA, 28 bp, synthetic construct
  misc_feature 1..28: note = Synthetic oligonucleotide
  source 1..28: mol_type = other DNA
ggaacatccccgcgcacgcggggaaaac

SEQ ID NO: 26827 - DNA, 30 bp, synthetic construct
  misc_feature 1..30: note = Synthetic oligonucleotide
  source 1..30: mol_type = other DNA
ggaagttatcattttgaaagcaattcacaa

SEQ ID NO: 26828 - DNA, 30 bp, synthetic construct; identical to SEQ ID NO: 26827
  misc_feature 1..30: note = Synthetic oligonucleotide
  source 1..30: mol_type = other DNA

SEQ ID NO: 26829 - DNA, 36 bp, synthetic construct
  misc_feature 1..36: note = Synthetic oligonucleotide
  source 1..36: mol_type = other DNA
ggagtctaccagggggactgaggactgattcccagc

SEQ ID NO: 26830 - DNA, 36 bp, synthetic construct
  misc_feature 1..36: note = Synthetic oligonucleotide
  source 1..36: mol_type = other DNA
ggagtctatctgggggtttgagaaccttttcccaac

SEQ ID NO: 26831 - DNA, 36 bp, synthetic construct; identical to SEQ ID NO: 26830
  misc_feature 1..36: note = Synthetic oligonucleotide
  source 1..36: mol_type = other DNA

SEQ ID NO: 26832 - DNA, 36 bp, synthetic construct
  misc_feature 1..36: note = Synthetic oligonucleotide
  source 1..36: mol_type = other DNA
ggcaagtaaccgctcgaagcgcagtgtctgcgaagc

SEQ ID NO: 26833 - DNA, 36 bp, synthetic construct; identical to SEQ ID NO: 26832
  misc_feature 1..36: note = Synthetic oligonucleotide
  source 1..36: mol_type = other DNA

SEQ ID NO: 26834 - DNA, 38 bp, synthetic construct
  misc_feature 1..38: note = Synthetic oligonucleotide
  source 1..38: mol_type = other DNA
ggcaagtaactgctcgaagcgcggtacctgcgaagccg

SEQ ID NO: 26835 - DNA, 34 bp, synthetic construct
  misc_feature 1..34: note = Synthetic oligonucleotide
  source 1..34: mol_type = other DNA
ggccgcactacgtgcgtaggcgtaggttgaaact

SEQ ID NO: 26836 - DNA, 36 bp, synthetic construct; identical to SEQ ID NO: 12280
  misc_feature 1..36: note = Synthetic oligonucleotide
  source 1..36: mol_type = other DNA

SEQ ID NO: 26837 - DNA, 36 bp, synthetic construct; identical to SEQ ID NO: 12280
  misc_feature 1..36: note = Synthetic oligonucleotide
  source 1..36: mol_type = other DNA

SEQ ID NO: 26838 - DNA, 37 bp, synthetic construct
  misc_feature 1..37: note = Synthetic oligonucleotide
  source 1..37: mol_type = other DNA
ggctgggaatcaatcacctctccccctgatatactta

SEQ ID NO: 26839 - DNA, 38 bp, synthetic construct
  misc_feature 1..38: note = Synthetic oligonucleotide
  source 1..38: mol_type = other DNA
ggctggggatggccgggaatcaccgctcatgtacacta

SEQ ID NO: 26840 - DNA, 37 bp, synthetic construct
  misc_feature 1..37: note = Synthetic oligonucleotide
  source 1..37: mol_type = other DNA
ggctgtggatggccgggaagcgccgcttggatacact

SEQ ID NO: 26841 - DNA, 19 bp, synthetic construct
  misc_feature 1..19: note = Synthetic oligonucleotide
  source 1..19: mol_type = other DNA
ggcttccctaccgatttcc

SEQ ID NO: 26842 - DNA, 19 bp, synthetic construct
  misc_feature 1..19: note = Synthetic oligonucleotide
  source 1..19: mol_type = other DNA
ggcttccctaccgatttcc

SEQ ID NO: 26843 - DNA, 31 bp, synthetic construct
  misc_feature 1..31: note = Synthetic oligonucleotide
  source 1..31: mol_type = other DNA
gggaaatatgatacttataaaggatcgacac

SEQ ID NO: 26844 - DNA, 22 bp, synthetic construct
  misc_feature 1..22: note = Synthetic oligonucleotide
  source 1..22: mol_type = other DNA
gggaaatgcgctccgaccgcaa

SEQ ID NO: 26845 - DNA, 38 bp, synthetic construct
  misc_feature 1..38: note = Synthetic oligonucleotide
  source 1..38: mol_type = other DNA
gggccgtggcttccctaccgatttccccgtggtaggct

SEQ ID NO: 26846 - DNA, 36 bp, synthetic construct
  misc_feature 1..36: note = Synthetic oligonucleotide
  source 1..36: mol_type = other DNA
ggggaccttcggcggcaatcgtcgcttgagtacatt

SEQ ID NO: 26847 - DNA, 38 bp, synthetic construct
  misc_feature 1..38: note = Synthetic oligonucleotide
  source 1..38: mol_type = other DNA
gggttccggtcagagcacaaatcccaatctgctagact

SEQ ID NO: 26848 - DNA, 20 bp, synthetic construct
  misc_feature 1..20: note = Synthetic oligonucleotide
  source 1..20: mol_type = other DNA
gggtttcaatccacgcactc

SEQ ID NO: 26849 - DNA, 36 bp, synthetic construct
  misc_feature 1..36: note = Synthetic oligonucleotide
  source 1..36: mol_type = other DNA
ggtaagtagctgcccgaagcgcggtacctgcaaagt

SEQ ID NO: 26850 - DNA, 36 bp, synthetic construct
  misc_feature 1..36: note = Synthetic oligonucleotide
  source 1..36: mol_type = other DNA
ggtaagtagctgtccgaagcgcggtacctgcaaagt

SEQ ID NO: 26851 - DNA, 36 bp, synthetic construct; identical to SEQ ID NO: 26850
  misc_feature 1..36: note = Synthetic oligonucleotide
  source 1..36: mol_type = other DNA

SEQ ID NO: 26852 - DNA, 36 bp, synthetic construct
  misc_feature 1..36: note = Synthetic oligonucleotide
  source 1..36: mol_type = other DNA
ggtaggacaggcagtgaatgcgagtttcagacaaat

SEQ ID NO: 26853 - DNA, 36 bp, synthetic construct
  misc_feature 1..36: note = Synthetic oligonucleotide
  source 1..36: mol_type = other DNA
ggtatacatcgattaagaatgacctcactctaaaac

SEQ ID NO: 26854 - DNA, 36 bp, synthetic construct
  misc_feature 1..36: note = Synthetic oligonucleotide
  source 1..36: mol_type = other DNA
ggtatagcaaatcgagaagcggccgcaatccgcaac

SEQ ID NO: 26855 - DNA, 36 bp, synthetic construct; identical to SEQ ID NO: 26854
  misc_feature 1..36: note = Synthetic oligonucleotide
  source 1..36: mol_type = other DNA

SEQ ID NO: 26856 - DNA, 37 bp, synthetic construct
  misc_feature 1..37: note = Synthetic oligonucleotide
  source 1..37: mol_type = other DNA
ggtatagccgactccgccgggatggtgaagtcaaaac

SEQ ID NO: 26857 - DNA, 36 bp, synthetic construct
  misc_feature 1..36: note = Synthetic oligonucleotide
  source 1..36: mol_type = other DNA
ggtcacaaagttacgaatttgaaagcaactcacaac

SEQ ID NO: 26858 - DNA, 36 bp, synthetic construct; identical to SEQ ID NO: 26857
  misc_feature 1..36: note = Synthetic oligonucleotide
  source 1..36: mol_type = other DNA

SEQ ID NO: 26859 - DNA, 36 bp, synthetic construct
  misc_feature 1..36: note = Synthetic oligonucleotide
  source 1..36: mol_type = other DNA
ggtcagctaccctatgagataacacctatctcaaac

SEQ ID NO: 26860 - DNA, 36 bp, synthetic construct; identical to SEQ ID NO: 26859
  misc_feature 1..36: note = Synthetic oligonucleotide
  source 1..36: mol_type = other DNA

SEQ ID NO: 26861 - DNA, 36 bp, synthetic construct; identical to SEQ ID NO: 26859
  misc_feature 1..36: note = Synthetic oligonucleotide
  source 1..36: mol_type = other DNA

SEQ ID NO: 26862 - DNA, 36 bp, synthetic construct
  misc_feature 1..36: note = Synthetic oligonucleotide
  source 1..36: mol_type = other DNA
ggtcagctcagtttgaaaagtgatctatggcaaagc

SEQ ID NO: 26863 - DNA, 36 bp, synthetic construct; identical to SEQ ID NO: 12293
  misc_feature 1..36: note = Synthetic oligonucleotide
  source 1..36: mol_type = other DNA

SEQ ID NO: 26864 - DNA, 36 bp, synthetic construct; identical to SEQ ID NO: 12293
  misc_feature 1..36: note = Synthetic oligonucleotide
  source 1..36: mol_type = other DNA

SEQ ID NO: 26865 - DNA, 34 bp, synthetic construct
  misc_feature 1..34: note = Synthetic oligonucleotide
  source 1..34: mol_type = other DNA
ggtcgcccctcgcatgaggggcgcggattgaaac

SEQ ID NO: 26866 - DNA, 36 bp, synthetic construct
  misc_feature 1..36: note = Synthetic oligonucleotide
  source 1..36: mol_type = other DNA
ggtctagacgctcgggatatgagctctggccggaac

SEQ ID NO: 26867 - DNA, 36 bp, synthetic construct
  misc_feature 1..36: note = Synthetic oligonucleotide
  source 1..36: mol_type = other DNA
ggtctagcactctggaaaagagggatcaactgtaac

SEQ ID NO: 26868 - DNA, 36 bp, synthetic construct
  misc_feature 1..36: note = Synthetic oligonucleotide
  source 1..36: mol_type = other DNA
ggtctagcagttcagaaaccgagggccaaccgcaac

SEQ ID NO: 26869 - DNA, 34 bp, synthetic construct
  misc_feature 1..34: note = Synthetic oligonucleotide
  source 1..34: mol_type = other DNA
ggtctaggtcattgatctgacaggcttctgaaac

SEQ ID NO: 26870 - DNA, 36 bp, synthetic construct
  misc_feature 1..36: note = Synthetic oligonucleotide
  source 1..36: mol_type = other DNA
ggtctatcttaacaaaaatcagcggtcatccccacc

SEQ ID NO: 26871 - DNA, 37 bp, synthetic construct
  misc_feature 1..37: note = Synthetic oligonucleotide
  source 1..37: mol_type = other DNA
ggtcttgagcacgcgcccttccccaaggtgatacgct

SEQ ID NO: 26872 - DNA, 36 bp, synthetic construct
  misc_feature 1..36: note = Synthetic oligonucleotide
  source 1..36: mol_type = other DNA
ggtgaactactacctggattaccgtacctccgaaac

SEQ ID NO: 26873 - DNA, 22 bp, synthetic construct
  misc_feature 1..22: note = Synthetic oligonucleotide
  source 1..22: mol_type = other DNA
ggtgaactactacttgatttac

SEQ ID NO: 26874 - DNA, 22 bp, synthetic construct
  misc_feature 1..22: note = Synthetic oligonucleotide
  source 1..22: mol_type = other DNA
ggtgaactactgcttggattac

SEQ ID NO: 26875 - DNA, 36 bp, synthetic construct; identical to SEQ ID NO: 12298
  misc_feature 1..36: note = Synthetic oligonucleotide
  source 1..36: mol_type = other DNA

SEQ ID NO: 26876 - DNA, 36 bp, synthetic construct
  misc_feature 1..36: note = Synthetic oligonucleotide
  source 1..36: mol_type = other DNA
ggtgcgcaccgccgtaagaatcaggttggctaaaac

SEQ ID NO: 26877 - DNA, 36 bp, synthetic construct
  misc_feature 1..36: note = Synthetic oligonucleotide
  source 1..36: mol_type = other DNA
ggtgcggccgagcgtccattctccggtgactaaaac

SEQ ID NO: 26878 - DNA, 36 bp, synthetic construct
  misc_feature 1..36: note = Synthetic oligonucleotide
  source 1..36: mol_type = other DNA
ggtgtagttgatcccagcccgcgaccaatccgcaac

SEQ ID NO: 26879 - DNA, 36 bp, synthetic construct; identical to SEQ ID NO: 26878
  misc_feature 1..36: note = Synthetic oligonucleotide
  source 1..36: mol_type = other DNA

SEQ ID NO: 26880 - DNA, 36 bp, synthetic construct; identical to SEQ ID NO: 12307
  misc_feature 1..36: note = Synthetic oligonucleotide
  source 1..36: mol_type = other DNA

SEQ ID NO: 26881 - DNA, 33 bp, synthetic construct
  misc_feature 1..33: note = Synthetic oligonucleotide
  source 1..33: mol_type = other DNA
ggtgtcaccaatacctcaaagatacaatctgaa

SEQ ID NO: 26882 - DNA, 32 bp, synthetic construct
  misc_feature 1..32: note = Synthetic oligonucleotide
  source 1..32: mol_type = other DNA
ggtgtgtcaaagatcgtcaaatcacaaattga

SEQ ID NO: 26883 - DNA, 36 bp, synthetic construct
  misc_feature 1..36: note = Synthetic oligonucleotide
  source 1..36: mol_type = other DNA
ggtgtttatcaataaatcaaagatacaatttgaaat

SEQ ID NO: 26884 - DNA, 35 bp, synthetic construct
  misc_feature 1..35: note = Synthetic oligonucleotide
  source 1..35: mol_type = other DNA
ggtgtttatcaataagtcaaagatacattttgaaa

SEQ ID NO: 26885 - DNA, 36 bp, synthetic construct
  misc_feature 1..36: note = Synthetic oligonucleotide
  source 1..36: mol_type = other DNA
ggtgtttatcagtaagtcaaagatacaatttgaaag

SEQ ID NO: 26886 - DNA, 37 bp, synthetic construct
  misc_feature 1..37: note = Synthetic oligonucleotide
  source 1..37: mol_type = other DNA
ggtgtttccgatagttcaaagttacaaattcaaaagc

SEQ ID NO: 26887 - DNA, 36 bp, synthetic construct; identical to SEQ ID NO: 12333
  misc_feature 1..36: note = Synthetic oligonucleotide
  source 1..36: mol_type = other DNA

SEQ ID NO: 26888 - DNA, 30 bp, synthetic construct
  misc_feature 1..30: note = Synthetic oligonucleotide
  source 1..30: mol_type = other DNA
ggtgtttcgaatatttcaaagatctcaatt

SEQ ID NO: 26889 - DNA, 31 bp, synthetic construct
  misc_feature 1..31: note = Synthetic oligonucleotide
  source 1..31: mol_type = other DNA
ggttcaactcttacactccctgatatacttg

SEQ ID NO: 26890 - DNA, 31 bp, synthetic construct; identical to SEQ ID NO: 26889
  misc_feature 1..31: note = Synthetic oligonucleotide
  source 1..31: mol_type = other DNA

SEQ ID NO: 26891 - DNA, 31 bp, synthetic construct; identical to SEQ ID NO: 26889
  misc_feature 1..31: note = Synthetic oligonucleotide
  source 1..31: mol_type = other DNA

SEQ ID NO: 26892 - DNA, 36 bp, synthetic construct
  misc_feature 1..36: note = Synthetic oligonucleotide
  source 1..36: mol_type = other DNA
ggttcatcttaacaaagatcagcaatcatccccaac

SEQ ID NO: 26893 - DNA, 36 bp, synthetic construct
  misc_feature 1..36: note = Synthetic oligonucleotide
  source 1..36: mol_type = other DNA
ggttcggctggagcacatttcctgatctgctagcct

SEQ ID NO: 26894 - DNA, 36 bp, synthetic construct
  misc_feature 1..36: note = Synthetic oligonucleotide
  source 1..36: mol_type = other DNA
ggttcttaagtaattgagatgacttactactaaaac

SEQ ID NO: 26895 - DNA, 37 bp, synthetic construct
  misc_feature 1..37: note = Synthetic oligonucleotide
  source 1..37: mol_type = other DNA
ggttgcggttggccctcgatcacccggccgctaaact

SEQ ID NO: 26896 - DNA, 37 bp, synthetic construct
  misc_feature 1..37: note = Synthetic oligonucleotide
  source 1..37: mol_type = other DNA
ggttgcgtaaagatacattttgaaagctatctacaac

SEQ ID NO: 26897 - DNA, 37 bp, synthetic construct
  misc_feature 1..37: note = Synthetic oligonucleotide
  source 1..37: mol_type = other DNA
ggttgggaatcagtcacctctccctttgatagactta

SEQ ID NO: 26898 - DNA, 37 bp, synthetic construct
  misc_feature 1..37: note = Synthetic oligonucleotide
  source 1..37: mol_type = other DNA
ggttgtagttccctggtagtccttggtatggtataat

SEQ ID NO: 26899 - DNA, 37 bp, synthetic construct
  misc_feature 1..37: note = Synthetic oligonucleotide
  source 1..37: mol_type = other DNA
ggttgtagttccctggtagttcttggtatggtataat

SEQ ID NO: 26900 - DNA, 37 bp, synthetic construct
  misc_feature 1..37: note = Synthetic oligonucleotide
  source 1..37: mol_type = other DNA
ggttgtagttccctgtattttctcgtagtggtataac

SEQ ID NO: 26901 - DNA, 37 bp, synthetic construct
  misc_feature 1..37: note = Synthetic oligonucleotide
  source 1..37: mol_type = other DNA
ggttgtgaatgactctcaaattcatatcagaagcatc

SEQ ID NO: 26902 - DNA, 37 bp, synthetic construct
  misc_feature 1..37: note = Synthetic oligonucleotide
  source 1..37: mol_type = other DNA
ggttgtggtttgatgtaggaatagagagatatacaac

SEQ ID NO: 26903 - DNA, 37 bp, synthetic construct; identical to SEQ ID NO: 12351
  misc_feature 1..37: note = Synthetic oligonucleotide
  source 1..37: mol_type = other DNA

SEQ ID NO: 26904 - DNA, 38 bp, synthetic construct
  misc_feature 1..38: note = Synthetic oligonucleotide
  source 1..38: mol_type = other DNA
ggttgttgttcccagttatcgcttggtatgatataata

SEQ ID NO: 26905 - DNA, 37 bp, synthetic construct
  misc_feature 1..37: note = Synthetic oligonucleotide
  source 1..37: mol_type = other DNA
ggtttaactaccagtcaggacgtcactacaccaaaac

SEQ ID NO: 26906 - DNA, 36 bp, synthetic construct; identical to SEQ ID NO: 12353
  misc_feature 1..36: note = Synthetic oligonucleotide
  source 1..36: mol_type = other DNA

SEQ ID NO: 26907 - DNA, 36 bp, synthetic construct
  misc_feature 1..36: note = Synthetic oligonucleotide
  source 1..36: mol_type = other DNA
ggtttagcagttcagaaatcgcaggccaaccgcaac

SEQ ID NO: 26908 - DNA, 36 bp, synthetic construct; identical to SEQ ID NO: 26907
  misc_feature 1..36: note = Synthetic oligonucleotide
  source 1..36: mol_type = other DNA

SEQ ID NO: 26909 - DNA, 37 bp, synthetic construct
  misc_feature 1..37: note = Synthetic oligonucleotide
  source 1..37: mol_type = other DNA
ggtttgagagtagtgtaattttaaagagtagttaaac

SEQ ID NO: 26910 - DNA, 37 bp, synthetic construct
  misc_feature 1..37: note = Synthetic oligonucleotide
  source 1..37: mol_type = other DNA
ggtttgagagtagtgtaattttatagggtagtaaaac

SEQ ID NO: 26911 - DNA, 37 bp, synthetic construct
  misc_feature 1..37: note = Synthetic oligonucleotide
  source 1..37: mol_type = other DNA
ggtttgagtatggtgcaattttaaagggtagtcaaac

SEQ ID NO: 26912 - DNA, 38 bp, synthetic construct
  misc_feature 1..38: note = Synthetic oligonucleotide
  source 1..38: mol_type = other DNA
ggttttgagcctaccgcattagaaggcaagctataatc

SEQ ID NO: 26913 - DNA, 37 bp, synthetic construct
  misc_feature 1..37: note = Synthetic oligonucleotide
  source 1..37: mol_type = other DNA
ggttttggagtagtgtctatttaacttgtaatcaatc

SEQ ID NO: 26914 - DNA, 37 bp, synthetic construct
  misc_feature 1..37: note = Synthetic oligonucleotide
  source 1..37: mol_type = other DNA
ggttttggcagccgaccattccctaaccggctaaagt

SEQ ID NO: 26915 - DNA, 37 bp, synthetic construct; identical to SEQ ID NO: 26914
  misc_feature 1..37: note = Synthetic oligonucleotide
  source 1..37: mol_type = other DNA

SEQ ID NO: 26916 - DNA, 37 bp, synthetic construct; identical to SEQ ID NO: 26914
  misc_feature 1..37: note = Synthetic oligonucleotide
  source 1..37: mol_type = other DNA

SEQ ID NO: 26917 - DNA, 37 bp, synthetic construct; identical to SEQ ID NO: 26914
  misc_feature 1..37: note = Synthetic oligonucleotide
  source 1..37: mol_type = other DNA

SEQ ID NO: 26918 - DNA, 37 bp, synthetic construct
  misc_feature 1..37: note = Synthetic oligonucleotide
  source 1..37: mol_type = other DNA
ggtttttgtactctcaagatttaagtaactgtacaac

SEQ ID NO: 26919 - DNA, 22 bp, synthetic construct
  misc_feature 1..22: note = Synthetic oligonucleotide
  source 1..22: mol_type = other DNA
gtaaatcaagcagtagatcacc

SEQ ID NO: 26920 - DNA, 34 bp, synthetic construct
  misc_feature 1..34: note = Synthetic oligonucleotide
  source 1..34: mol_type = other DNA
gtaaatctacaaaaatttgaaaggaactcacaac

SEQ ID NO: 26921 - DNA, 20 bp, synthetic construct
  misc_feature 1..20: note = Synthetic oligonucleotide
  source 1..20: mol_type = other DNA
gtaaccgtcccctcgcgggg

SEQ ID NO: 26922 - DNA, 20 bp, synthetic construct
  misc_feature 1..20: note = Synthetic oligonucleotide
  source 1..20: mol_type = other DNA
gtaaccgtcccctcgcgggg

SEQ ID NO: 26923 - DNA, 20 bp, synthetic construct
  misc_feature 1..20: note = Synthetic oligonucleotide
  source 1..20: mol_type = other DNA
gtaaccgtcccctcgcgggg

SEQ ID NO: 26924 - DNA, 19 bp, synthetic construct
  misc_feature 1..19: note = Synthetic oligonucleotide
  source 1..19: mol_type = other DNA
gtaagagaaccagctgaat

SEQ ID NO: 26925 - DNA, 36 bp, synthetic construct; identical to SEQ ID NO: 12365
  misc_feature 1..36: note = Synthetic oligonucleotide
  source 1..36: mol_type = other DNA

SEQ ID NO: 26926 - DNA, 36 bp, synthetic construct
  misc_feature 1..36: note = Synthetic oligonucleotide
  source 1..36: mol_type = other DNA
gtaataccttatctcaattttgaatcaaaccacaac

SEQ ID NO: 26927 - DNA, 22 bp, synthetic construct
  misc_feature 1..22: note = Synthetic oligonucleotide
  source 1..22: mol_type = other DNA
gtaatccaagtagtagttcacc

SEQ ID NO: 26928 - DNA, 36 bp, synthetic construct
  misc_feature 1..36: note = Synthetic oligonucleotide
  source 1..36: mol_type = other DNA
gtacaaatttatcaatatccatcagagaaccgaaac

SEQ ID NO: 26929 - DNA, 36 bp, synthetic construct; identical to SEQ ID NO: 26928
  misc_feature 1..36: note = Synthetic oligonucleotide
  source 1..36: mol_type = other DNA

SEQ ID NO: 26930 - DNA, 36 bp, synthetic construct; identical to SEQ ID NO: 12369
  misc_feature 1..36: note = Synthetic oligonucleotide
  source 1..36: mol_type = other DNA

SEQ ID NO: 26931 - DNA, 21 bp, synthetic construct
  misc_feature 1..21: note = Synthetic oligonucleotide
  source 1..21: mol_type = other DNA
gtaccgcaaaccaagcagtag

SEQ ID NO: 26932 - DNA, 21 bp, synthetic construct
  misc_feature 1..21: note = Synthetic oligonucleotide
  source 1..21: mol_type = other DNA
gtaccgcaaaccaagcagtag

SEQ ID NO: 26933 - DNA, 27 bp, synthetic construct
  misc_feature 1..27: note = Synthetic oligonucleotide
  source 1..27: mol_type = other DNA
gtaccgtaattcaattagtagtttacc

SEQ ID NO: 26934 - DNA, 26 bp, synthetic construct
  misc_feature 1..26: note = Synthetic oligonucleotide
  source 1..26: mol_type = other DNA
gtacgagttttcaagcaaatcacaac

SEQ ID NO: 26935 - DNA, 26 bp, synthetic construct
  misc_feature 1..26: note = Synthetic oligonucleotide
  source 1..26: mol_type = other DNA
gtacgagttttcaagcaaatcacaac

SEQ ID NO: 26936 - DNA, 36 bp, synthetic construct
  misc_feature 1..36: note = Synthetic oligonucleotide
  source 1..36: mol_type = other DNA
gtacttaactaaccataaatagcattactctcaaac

SEQ ID NO: 26937 - DNA, 30 bp, synthetic construct
  misc_feature 1..30: note = Synthetic oligonucleotide
  source 1..30: mol_type = other DNA
gtactttacaattttacaaggttctcaaac

SEQ ID NO: 26938 - DNA, 30 bp, synthetic construct; identical to SEQ ID NO: 26937
  misc_feature 1..30: note = Synthetic oligonucleotide
  source 1..30: mol_type = other DNA

SEQ ID NO: 26939 - DNA, 36 bp, synthetic construct
  misc_feature 1..36: note = Synthetic oligonucleotide
  source 1..36: mol_type = other DNA
gtactttatatgctttaaattacattactctcaaac

SEQ ID NO: 26940 - DNA, 31 bp, synthetic construct
  misc_feature 1..31: note = Synthetic oligonucleotide
  source 1..31: mol_type = other DNA
gtagaattcaaaatttacatatctctcaaac

SEQ ID NO: 26941 - DNA, 36 bp, synthetic construct; identical to SEQ ID NO: 12372
  misc_feature 1..36: note = Synthetic oligonucleotide
  source 1..36: mol_type = other DNA

SEQ ID NO: 26942 - DNA, 36 bp, synthetic construct; identical to SEQ ID NO: 12373
  misc_feature 1..36: note = Synthetic oligonucleotide
  source 1..36: mol_type = other DNA

SEQ ID NO: 26943 - DNA, 36 bp, synthetic construct
  misc_feature 1..36: note = Synthetic oligonucleotide
  source 1..36: mol_type = other DNA
gtagtacagttacttaaatcttgagagtacaaaaac

SEQ ID NO: 26944 - DNA, 36 bp, synthetic construct; identical to SEQ ID NO: 26943
  misc_feature 1..36: note = Synthetic oligonucleotide
  source 1..36: mol_type = other DNA

SEQ ID NO: 26945 - DNA, 36 bp, synthetic construct; identical to SEQ ID NO: 26943
  misc_feature 1..36: note = Synthetic oligonucleotide
  source 1..36: mol_type = other DNA

SEQ ID NO: 26946 - DNA, 36 bp, synthetic construct; identical to SEQ ID NO: 12374
  misc_feature 1..36: note = Synthetic oligonucleotide
  source 1..36: mol_type = other DNA

SEQ ID NO: 26947 - DNA, 36 bp, synthetic construct; identical to SEQ ID NO: 12374
  misc_feature 1..36: note = Synthetic oligonucleotide
  source 1..36: mol_type = other DNA

SEQ ID NO: 26948 - DNA, 36 bp, synthetic construct; identical to SEQ ID NO: 12374
  misc_feature 1..36: note = Synthetic oligonucleotide
  source 1..36: mol_type = other DNA

SEQ ID NO: 26949 - DNA, 36 bp, synthetic construct; identical to SEQ ID NO: 12374
  misc_feature 1..36: note = Synthetic oligonucleotide
  source 1..36: mol_type = other DNA

SEQ ID NO: 26950 - DNA, 36 bp, synthetic construct; identical to SEQ ID NO: 12374
  misc_feature 1..36: note = Synthetic oligonucleotide
  source 1..36: mol_type = other DNA

SEQ ID NO: 26951 - DNA, 36 bp, synthetic construct; identical to SEQ ID NO: 12374
  misc_feature 1..36: note = Synthetic oligonucleotide
  source 1..36: mol_type = other DNA

SEQ ID NO: 26952 - DNA, 36 bp, synthetic construct; identical to SEQ ID NO: 12374
  misc_feature 1..36: note = Synthetic oligonucleotide
  source 1..36: mol_type = other DNA

SEQ ID NO: 26953 - DNA, 36 bp, synthetic construct; identical to SEQ ID NO: 12374
  misc_feature 1..36: note = Synthetic oligonucleotide
  source 1..36: mol_type = other DNA

SEQ ID NO: 26954 - DNA, 36 bp, synthetic construct
  misc_feature 1..36: note = Synthetic oligonucleotide
  source 1..36: mol_type = other DNA
gtagtagaactatctggaatgacatagttccaaaac

SEQ ID NO: 26955 - DNA, 26 bp, synthetic construct
  misc_feature 1..26: note = Synthetic oligonucleotide
  source 1..26: mol_type = other DNA
gtagtgtatccgagcgacgattcccc

SEQ ID NO: 26956 - DNA, 36 bp, synthetic construct
  misc_feature 1..36: note = Synthetic oligonucleotide
  source 1..36: mol_type = other DNA
gtataagcaccatttggaattacaccatactcaaac

SEQ ID NO: 26957 - DNA, 36 bp, synthetic construct
  misc_feature 1..36: note = Synthetic oligonucleotide
  source 1..36: mol_type = other DNA
gtataagcttaccgatatccgacagaggactaaaac

SEQ ID NO: 26958 - DNA, 36 bp, synthetic construct; identical to SEQ ID NO: 12378
  misc_feature 1..36: note = Synthetic oligonucleotide
  source 1..36: mol_type = other DNA

SEQ ID NO: 26959 - DNA, 36 bp, synthetic construct; identical to SEQ ID NO: 12378
  misc_feature 1..36: note = Synthetic oligonucleotide
  source 1..36: mol_type = other DNA

SEQ ID NO: 26960 - DNA, 36 bp, synthetic construct; identical to SEQ ID NO: 12378
  misc_feature 1..36: note = Synthetic oligonucleotide
  source 1..36: mol_type = other DNA

SEQ ID NO: 26961 - DNA, 36 bp, synthetic construct; identical to SEQ ID NO: 12378
  misc_feature 1..36: note = Synthetic oligonucleotide
  source 1..36: mol_type = other DNA

SEQ ID NO: 26962 - DNA, 36 bp, synthetic construct
  misc_feature 1..36: note = Synthetic oligonucleotide
  source 1..36: mol_type = other DNA
gtataagtttatcaatatccatcagagaaccaaaac

SEQ ID NO: 26963 - DNA, 36 bp, synthetic construct; identical to SEQ ID NO: 12379
  misc_feature 1..36: note = Synthetic oligonucleotide
  source 1..36: mol_type = other DNA

SEQ ID NO: 26964 - DNA, 25 bp, synthetic construct
  misc_feature 1..25: note = Synthetic oligonucleotide
  source 1..25: mol_type = other DNA
gtataagtttatcaatattcatcag

SEQ ID NO: 26965 - DNA, 36 bp, synthetic construct
  misc_feature 1..36: note = Synthetic oligonucleotide
  source 1..36: mol_type = other DNA
gtataagtttatcaatattcatcagagaaccaaaac

SEQ ID NO: 26966 - DNA, 36 bp, synthetic construct; identical to SEQ ID NO: 12380
  misc_feature 1..36: note = Synthetic oligonucleotide
  source 1..36: mol_type = other DNA

SEQ ID NO: 26967 - DNA, 36 bp, synthetic construct; identical to SEQ ID NO: 12380
  misc_feature 1..36: note = Synthetic oligonucleotide
  source 1..36: mol_type = other DNA

SEQ ID NO: 26968 - DNA, 36 bp, synthetic construct; identical to SEQ ID NO: 12380
  misc_feature 1..36: note = Synthetic oligonucleotide
  source 1..36: mol_type = other DNA

SEQ ID NO: 26969 - DNA, 36 bp, synthetic construct; identical to SEQ ID NO: 12380
  misc_feature 1..36: note = Synthetic oligonucleotide
  source 1..36: mol_type = other DNA

SEQ ID NO: 26970 - DNA, 36 bp, synthetic construct; identical to SEQ ID NO: 12380
  misc_feature 1..36: note = Synthetic oligonucleotide
  source 1..36: mol_type = other DNA

SEQ ID NO: 26971 - DNA, 36 bp, synthetic construct; identical to SEQ ID NO: 12380
  misc_feature 1..36: note = Synthetic oligonucleotide
  source 1..36: mol_type = other DNA

SEQ ID NO: 26972 - DNA, 36 bp, synthetic construct; identical to SEQ ID NO: 12380
  misc_feature 1..36: note = Synthetic oligonucleotide
  source 1..36: mol_type = other DNA

SEQ ID NO: 26973 - DNA, 36 bp, synthetic construct; identical to SEQ ID NO: 12380
  misc_feature 1..36: note = Synthetic oligonucleotide
  source 1..36: mol_type = other DNA

SEQ ID NO: 26974 - DNA, 36 bp, synthetic construct; identical to SEQ ID NO: 12380
  misc_feature 1..36: note = Synthetic oligonucleotide
  source 1..36: mol_type = other DNA

SEQ ID NO: 26975 - DNA, 36 bp, synthetic construct; identical to SEQ ID NO: 12380
  misc_feature 1..36: note = Synthetic oligonucleotide
  source 1..36: mol_type = other DNA

SEQ ID NO: 26976 - DNA, 36 bp, synthetic construct; identical to SEQ ID NO: 12380
  misc_feature 1..36: note = Synthetic oligonucleotide
  source 1..36: mol_type = other DNA

SEQ ID NO: 26977 - DNA, 36 bp, synthetic construct; identical to SEQ ID NO: 12380
  misc_feature 1..36: note = Synthetic oligonucleotide
  source 1..36: mol_type = other DNA

SEQ ID NO: 26978 - DNA, 36 bp, synthetic construct; identical to SEQ ID NO: 12380
  misc_feature 1..36: note = Synthetic oligonucleotide
  source 1..36: mol_type = other DNA

SEQ ID NO: 26979 - DNA, 36 bp, synthetic construct; identical to SEQ ID NO: 12380
  misc_feature 1..36: note = Synthetic oligonucleotide
  source 1..36: mol_type = other DNA

SEQ ID NO: 26980 - DNA, 36 bp, synthetic construct; identical to SEQ ID NO: 12380
  misc_feature 1..36: note = Synthetic oligonucleotide
  source 1..36: mol_type = other DNA

SEQ ID NO: 26981 - DNA, 36 bp, synthetic construct; identical to SEQ ID NO: 12380
  misc_feature 1..36: note = Synthetic oligonucleotide
  source 1..36: mol_type = other DNA

SEQ ID NO: 26982 - DNA, 36 bp, synthetic construct
  misc_feature 1..36: note = Synthetic oligonucleotide
  source 1..36: mol_type = other DNA
gtataagtttatcaatattcatcataaagccaaaac

SEQ ID NO: 26983 - DNA, 36 bp, synthetic construct; identical to SEQ ID NO: 26982
  misc_feature 1..36: note = Synthetic oligonucleotide
  source 1..36: mol_type = other DNA

SEQ ID NO: 26984 - DNA, 36 bp, synthetic construct
  misc_feature 1..36: note = Synthetic oligonucleotide
  source 1..36: mol_type = other DNA
gtataagtttatcaatattcattagagagccaaaac

SEQ ID NO: 26985 - DNA, 36 bp, synthetic construct; identical to SEQ ID NO: 26984
  misc_feature 1..36: note = Synthetic oligonucleotide
  source 1..36: mol_type = other DNA

SEQ ID NO: 26986 - DNA, 36 bp, synthetic construct; identical to SEQ ID NO: 26984
  misc_feature 1..36: note = Synthetic oligonucleotide
  source 1..36: mol_type = other DNA

SEQ ID NO: 26987 - DNA, 36 bp, synthetic construct
  misc_feature 1..36: note = Synthetic oligonucleotide
  source 1..36: mol_type = other DNA
gtatacaacgtattgaatttaacatagctagcaaac

SEQ ID NO: 26988 - DNA, 36 bp, synthetic construct
  misc_feature 1..36: note = Synthetic oligonucleotide
  source 1..36: mol_type = other DNA
gtataccttatacctaaaattacagagtactaaaac

SEQ ID NO: 26989 - DNA, 36 bp, synthetic construct
  misc_feature 1..36: note = Synthetic oligonucleotide
  source 1..36: mol_type = other DNA
gtatagaacccatcttgtttaacacacctagcaaac

SEQ ID NO: 26990 - DNA, 36 bp, synthetic construct
  misc_feature 1..36: note = Synthetic oligonucleotide
  source 1..36: mol_type = other DNA
gtatagaaccctaattgtttaacacacttagcaaac

SEQ ID NO: 26991 - DNA, 36 bp, synthetic construct
  misc_feature 1..36: note = Synthetic oligonucleotide
  source 1..36: mol_type = other DNA
gtatagtacatatcatattcagcatacctagcaaac

SEQ ID NO: 26992 - DNA, 36 bp, synthetic construct
  misc_feature 1..36: note = Synthetic oligonucleotide
  source 1..36: mol_type = other DNA
gtatcacatcattaaactttaagaagagactgagtc

SEQ ID NO: 26993 - DNA, 36 bp, synthetic construct
  misc_feature 1..36: note = Synthetic oligonucleotide
  source 1..36: mol_type = other DNA
gtatcagtctatcaatgtccatcagaggtgtaaaac

SEQ ID NO: 26994 - DNA, 36 bp, synthetic construct
  misc_feature 1..36: note = Synthetic oligonucleotide
  source 1..36: mol_type = other DNA
gtatcagtttacctatatccaacagatgtctaaaac

SEQ ID NO: 26995 - DNA, 36 bp, synthetic construct; identical to SEQ ID NO: 12385
  misc_feature 1..36: note = Synthetic oligonucleotide
  source 1..36: mol_type = other DNA

SEQ ID NO: 26996 - DNA, 36 bp, synthetic construct; identical to SEQ ID NO: 12385
  misc_feature 1..36: note = Synthetic oligonucleotide
  source 1..36: mol_type = other DNA

SEQ ID NO: 26997 - DNA, 36 bp, synthetic construct; identical to SEQ ID NO: 12385
  misc_feature 1..36: note = Synthetic oligonucleotide
  source 1..36: mol_type = other DNA

SEQ ID NO: 26998 - DNA, 36 bp, synthetic construct; identical to SEQ ID NO: 12387
  misc_feature 1..36: note = Synthetic oligonucleotide
  source 1..36: mol_type = other DNA

SEQ ID NO: 26999 - DNA, 36 bp, synthetic construct; identical to SEQ ID NO: 12387
  misc_feature 1..36: note = Synthetic oligonucleotide
  source 1..36: mol_type = other DNA

SEQ ID NO: 27000 - DNA, 27 bp, synthetic construct
  misc_feature 1..27: note = Synthetic oligonucleotide
  source 1..27: mol_type = other DNA
gtatcggagaataccctgtgactataa

SEQ ID NO: 27001 - DNA, 25 bp, synthetic construct
  misc_feature 1..25: note = Synthetic oligonucleotide
  source 1..25: mol_type = other DNA
gtatctttgcatcattagagacaac

SEQ ID NO: 27002 - DNA, 36 bp, synthetic construct
  misc_feature 1..36: note = Synthetic oligonucleotide
  source 1..36: mol_type = other DNA
gtattaacttatcaatattcatcagagaattaaaac

SEQ ID NO: 27003 - DNA, 30 bp, synthetic construct; identical to SEQ ID NO: 12391
  misc_feature 1..30: note = Synthetic oligonucleotide
  source 1..30: mol_type = other DNA

SEQ ID NO: 27004 - DNA, 36 bp, synthetic construct
  misc_feature 1..36: note = Synthetic oligonucleotide
  source 1..36: mol_type = other DNA
gtattctaatatctatattcaacatacctagcaaac

SEQ ID NO: 27005 - DNA, 36 bp, synthetic construct
  misc_feature 1..36: note = Synthetic oligonucleotide
  source 1..36: mol_type = other DNA
gtcaaagaccgttcgttacttacaaggttctcaagc

SEQ ID NO: 27006 - DNA, 36 bp, synthetic construct
  misc_feature 1..36: note = Synthetic oligonucleotide
  source 1..36: mol_type = other DNA
gtcaaagcatgtcagaaatcgcggtccagctgcaac

SEQ ID NO: 27007 - DNA, 35 bp, synthetic construct
  misc_feature 1..35: note = Synthetic oligonucleotide
  source 1..35: mol_type = other DNA
gtcacaaagttacgaaattgaaagcaactcacaac

SEQ ID NO: 27008 - DNA, 36 bp, synthetic construct
  misc_feature 1..36: note = Synthetic oligonucleotide
  source 1..36: mol_type = other DNA
gtcacaatgaatgtgaagatatcggttgattgaaac

SEQ ID NO: 27009 - DNA, 28 bp, synthetic construct
  misc_feature 1..28: note = Synthetic oligonucleotide
  source 1..28: mol_type = other DNA
gtcacgtaatttgtttaggtactaaaat

SEQ ID NO: 27010 - DNA, 36 bp, synthetic construct; identical to SEQ ID NO: 12401
  misc_feature 1..36: note = Synthetic oligonucleotide
  source 1..36: mol_type = other DNA

SEQ ID NO: 27011 - DNA, 36 bp, synthetic construct
  misc_feature 1..36: note = Synthetic oligonucleotide
  source 1..36: mol_type = other DNA
gtcatacagtcacgtaattgtctaggtactaaaata

SEQ ID NO: 27012 - DNA, 36 bp, synthetic construct
  misc_feature 1..36: note = Synthetic oligonucleotide
  source 1..36: mol_type = other DNA
gtcatacattactaaaaattaacagggtccagtaac

SEQ ID NO: 27013 - DNA, 36 bp, synthetic construct; identical to SEQ ID NO: 27012
  misc_feature 1..36: note = Synthetic oligonucleotide
  source 1..36: mol_type = other DNA

SEQ ID NO: 27014 - DNA, 36 bp, synthetic construct
  misc_feature 1..36: note = Synthetic oligonucleotide
  source 1..36: mol_type = other DNA
gtcatacattactaaaaattaacagggtcctgtaac

SEQ ID NO: 27015 - DNA, 36 bp, synthetic construct; identical to SEQ ID NO: 27014
  misc_feature 1..36: note = Synthetic oligonucleotide
  source 1..36: mol_type = other DNA

SEQ ID NO: 27016 - DNA, 36 bp, synthetic construct; identical to SEQ ID NO: 27014
  misc_feature 1..36: note = Synthetic oligonucleotide
  source 1..36: mol_type = other DNA

SEQ ID NO: 27017 - DNA, 36 bp, synthetic construct; identical to SEQ ID NO: 27014
  misc_feature 1..36: note = Synthetic oligonucleotide
  source 1..36: mol_type = other DNA

SEQ ID NO: 27018 - DNA, 36 bp, synthetic construct; identical to SEQ ID NO: 27014
  misc_feature 1..36: note = Synthetic oligonucleotide
  source 1..36: mol_type = other DNA

SEQ ID NO: 27019 - DNA, 36 bp, synthetic construct; identical to SEQ ID NO: 27014
  misc_feature 1..36: note = Synthetic oligonucleotide
  source 1..36: mol_type = other DNA

SEQ ID NO: 27020 - DNA, 36 bp, synthetic construct; identical to SEQ ID NO: 27014
  misc_feature 1..36: note = Synthetic oligonucleotide
  source 1..36: mol_type = other DNA

SEQ ID NO: 27021 - DNA, 36 bp, synthetic construct; identical to SEQ ID NO: 27014
  misc_feature 1..36: note = Synthetic oligonucleotide
  source 1..36: mol_type = other DNA

SEQ ID NO: 27022 - DNA, 36 bp, synthetic construct; identical to SEQ ID NO: 27014
  misc_feature 1..36: note = Synthetic oligonucleotide
  source 1..36: mol_type = other DNA

SEQ ID NO: 27023 - DNA, 36 bp, synthetic construct; identical to SEQ ID NO: 27014
  misc_feature 1..36: note = Synthetic oligonucleotide
  source 1..36: mol_type = other DNA

SEQ ID NO: 27024 - DNA, 36 bp, synthetic construct; identical to SEQ ID NO: 27014
  misc_feature 1..36: note = Synthetic oligonucleotide
  source 1..36: mol_type = other DNA

SEQ ID NO: 27025 - DNA, 36 bp, synthetic construct
  misc_feature 1..36: note = Synthetic oligonucleotide
  source 1..36: mol_type = other DNA
gtcatagcagttcagaaatcgcggtccagctgcaac

SEQ ID NO: 27026 - DNA, 37 bp, synthetic construct
  misc_feature 1..37: note = Synthetic oligonucleotide
  source 1..37: mol_type = other DNA
gtcatagcagttcagaaatcgcggtccagctgcaaca

SEQ ID NO: 27027 - DNA, 36 bp, synthetic construct
  misc_feature 1..36: note = Synthetic oligonucleotide
  source 1..36: mol_type = other DNA
gtcatagcatctcagatatcgcaggccaaccgcagc

SEQ ID NO: 27028 - DNA, 36 bp, synthetic construct
  misc_feature 1..36: note = Synthetic oligonucleotide
  source 1..36: mol_type = other DNA
gtcatagcttcccttttcgtaccgctatgctatgac

SEQ ID NO: 27029 - DNA, 36 bp, synthetic construct
  misc_feature 1..36: note = Synthetic oligonucleotide
  source 1..36: mol_type = other DNA
gtcatagcttccttacgcacaccagcgtgctatgat

SEQ ID NO: 27030 - DNA, 36 bp, synthetic construct; identical to SEQ ID NO: 12407
  misc_feature 1..36: note = Synthetic oligonucleotide
  source 1..36: mol_type = other DNA

SEQ ID NO: 27031 - DNA, 36 bp, synthetic construct
  misc_feature 1..36: note = Synthetic oligonucleotide
  source 1..36: mol_type = other DNA
gtcatagttccccttagattattgctgtgatatgat

SEQ ID NO: 27032 - DNA, 36 bp, synthetic construct
  misc_feature 1..36: note = Synthetic oligonucleotide
  source 1..36: mol_type = other DNA
gtcatagttccctaatagctcttagtatggtataat

SEQ ID NO: 27033 - DNA, 36 bp, synthetic construct; identical to SEQ ID NO: 27032
  misc_feature 1..36: note = Synthetic oligonucleotide
  source 1..36: mol_type = other DNA

SEQ ID NO: 27034 - DNA, 32 bp, synthetic construct
  misc_feature 1..32: note = Synthetic oligonucleotide
  source 1..32: mol_type = other DNA
gtcatagttccctaatagctcttggtatggta

SEQ ID NO: 27035 - DNA, 36 bp, synthetic construct
  misc_feature 1..36: note = Synthetic oligonucleotide
  source 1..36: mol_type = other DNA
gtcatagttccctaatagctcttggtatggtataat

SEQ ID NO: 27036 - DNA, 36 bp, synthetic construct; identical to SEQ ID NO: 27035
  misc_feature 1..36: note = Synthetic oligonucleotide
  source 1..36: mol_type = other DNA

SEQ ID NO: 27037 - DNA, 36 bp, synthetic construct; identical to SEQ ID NO: 27035
  misc_feature 1..36: note = Synthetic oligonucleotide
  source 1..36: mol_type = other DNA

SEQ ID NO: 27038 - DNA, 36 bp, synthetic construct; identical to SEQ ID NO: 27035
  misc_feature 1..36: note = Synthetic oligonucleotide
  source 1..36: mol_type = other DNA

SEQ ID NO: 27039 - DNA, 36 bp, synthetic construct; identical to SEQ ID NO: 27035
  misc_feature 1..36: note = Synthetic oligonucleotide
  source 1..36: mol_type = other DNA

SEQ ID NO: 27040 - DNA, 36 bp, synthetic construct; identical to SEQ ID NO: 27035
  misc_feature 1..36: note = Synthetic oligonucleotide
  source 1..36: mol_type = other DNA

SEQ ID NO: 27041 - DNA, 36 bp, synthetic construct; identical to SEQ ID NO: 27035
  misc_feature 1..36: note = Synthetic oligonucleotide
  source 1..36: mol_type = other DNA

SEQ ID NO: 27042 - DNA, 36 bp, synthetic construct; identical to SEQ ID NO: 27035
  misc_feature 1..36: note = Synthetic oligonucleotide
  source 1..36: mol_type = other DNA

SEQ ID NO: 27043 - DNA, 36 bp, synthetic construct; identical to SEQ ID NO: 27035
  misc_feature 1..36: note = Synthetic oligonucleotide
  source 1..36: mol_type = other DNA

SEQ ID NO: 27044 - DNA, 36 bp, synthetic construct; identical to SEQ ID NO: 27035
  misc_feature 1..36: note = Synthetic oligonucleotide
  source 1..36: mol_type = other DNA

SEQ ID NO: 27045 - DNA, 36 bp, synthetic construct; identical to SEQ ID NO: 27035
  misc_feature 1..36: note = Synthetic oligonucleotide
  source 1..36: mol_type = other DNA

SEQ ID NO: 27046 - DNA, 36 bp, synthetic construct; identical to SEQ ID NO: 27035
  misc_feature 1..36: note = Synthetic oligonucleotide
  source 1..36: mol_type = other DNA

SEQ ID NO: 27047 - DNA, 36 bp, synthetic construct; identical to SEQ ID NO: 27035
  misc_feature 1..36: note = Synthetic oligonucleotide
  source 1..36: mol_type = other DNA

SEQ ID NO: 27048 - DNA, 36 bp, synthetic construct; identical to SEQ ID NO: 27035
  misc_feature 1..36: note = Synthetic oligonucleotide
  source 1..36: mol_type = other DNA

SEQ ID NO: 27049 - DNA, 36 bp, synthetic construct; identical to SEQ ID NO: 27035
  misc_feature 1..36: note = Synthetic oligonucleotide
  source 1..36: mol_type = other DNA

SEQ ID NO: 27050 - DNA, 36 bp, synthetic construct
  misc_feature 1..36: note = Synthetic oligonucleotide
  source 1..36: mol_type = other DNA
gtcatagtttccattcccgtaccgctatgatatagt

SEQ ID NO: 27051 - DNA, 36 bp, synthetic construct
  misc_feature 1..36: note = Synthetic oligonucleotide
  source 1..36: mol_type = other DNA
gtcatagtttcctaatagctcttggtatggtataat

SEQ ID NO: 27052 - DNA, 36 bp, synthetic construct; identical to SEQ ID NO: 12408
  misc_feature 1..36: note = Synthetic oligonucleotide
  source 1..36: mol_type = other DNA

SEQ ID NO: 27053 - DNA, 36 bp, synthetic construct
  misc_feature 1..36: note = Synthetic oligonucleotide
  source 1..36: mol_type = other DNA
gtcatatttccctttttattcttggtatgttataat

SEQ ID NO: 27054 - DNA, 36 bp, synthetic construct; identical to SEQ ID NO: 27053
  misc_feature 1..36: note = Synthetic oligonucleotide
  source 1..36: mol_type = other DNA

SEQ ID NO: 27055 - DNA, 36 bp, synthetic construct; identical to SEQ ID NO: 27053
  misc_feature 1..36: note = Synthetic oligonucleotide
  source 1..36: mol_type = other DNA

SEQ ID NO: 27056 - DNA, 36 bp, synthetic construct; identical to SEQ ID NO: 27053
  misc_feature 1..36: note = Synthetic oligonucleotide
  source 1..36: mol_type = other DNA

SEQ ID NO: 27057 - DNA, 36 bp, synthetic construct; identical to SEQ ID NO: 27053
  misc_feature 1..36: note = Synthetic oligonucleotide
  source 1..36: mol_type = other DNA

SEQ ID NO: 27058 - DNA, 36 bp, synthetic construct
  misc_feature 1..36: note = Synthetic oligonucleotide
  source 1..36: mol_type = other DNA
gtcatatttccctttttatttttggtatgttataat

SEQ ID NO: 27059 - DNA, 36 bp, synthetic construct; identical to SEQ ID NO: 27058
  misc_feature 1..36: note = Synthetic oligonucleotide
  source 1..36: mol_type = other DNA

SEQ ID NO: 27060 - DNA, 36 bp, synthetic construct
  misc_feature 1..36: note = Synthetic oligonucleotide
  source 1..36: mol_type = other DNA
gtcatattttcctttttatttttggtatgttataat

SEQ ID NO: 27061 - DNA, 37 bp, synthetic construct
  misc_feature 1..37: note = Synthetic oligonucleotide
  source 1..37: mol_type = other DNA
gtcatgggttccctgcaattatcccctctgctagaat

SEQ ID NO: 27062 - DNA, 36 bp, synthetic construct
  misc_feature 1..36: note = Synthetic oligonucleotide
  source 1..36: mol_type = other DNA
gtcccggcgggcccccagcgttctcccgctgaagtc

SEQ ID NO: 27063 - DNA, 36 bp, synthetic construct
  misc_feature 1..36: note = Synthetic oligonucleotide
  source 1..36: mol_type = other DNA
gtccgagacttgtccgaaattgcacgactctcagac

SEQ ID NO: 27064 - DNA, 36 bp, synthetic construct; identical to SEQ ID NO: 27063
  misc_feature 1..36: note = Synthetic oligonucleotide
  source 1..36: mol_type = other DNA

SEQ ID NO: 27065 - DNA, 36 bp, synthetic construct
  misc_feature 1..36: note = Synthetic oligonucleotide
  source 1..36: mol_type = other DNA
gtccgggcttggccacgccgcttcctctgctaggat

SEQ ID NO: 27066 - DNA, 36 bp, synthetic construct; identical to SEQ ID NO: 12412
  misc_feature 1..36: note = Synthetic oligonucleotide
  source 1..36: mol_type = other DNA

SEQ ID NO: 27067 - DNA, 36 bp, synthetic construct; identical to SEQ ID NO: 12418
  misc_feature 1..36: note = Synthetic oligonucleotide
  source 1..36: mol_type = other DNA

SEQ ID NO: 27068 - DNA, 36 bp, synthetic construct; identical to SEQ ID NO: 12418
  misc_feature 1..36: note = Synthetic oligonucleotide
  source 1..36: mol_type = other DNA

SEQ ID NO: 27069 - DNA, 36 bp, synthetic construct; identical to SEQ ID NO: 12418
  misc_feature 1..36: note = Synthetic oligonucleotide
  source 1..36: mol_type = other DNA

SEQ ID NO: 27070 - DNA, 36 bp, synthetic construct
  misc_feature 1..36: note = Synthetic oligonucleotide
  source 1..36: mol_type = other DNA
gtcctagcactctggaaaagccggaccaaccgcaac

SEQ ID NO: 27071 - DNA, 37 bp, synthetic construct
  misc_feature 1..37: note = Synthetic oligonucleotide
  source 1..37: mol_type = other DNA
gtcgcaacgacaacggaagaatcagcttgattgaaac

SEQ ID NO: 27072 - DNA, 30 bp, synthetic construct
  misc_feature 1..30: note = Synthetic oligonucleotide
  source 1..30: mol_type = other DNA
gtcgcaacgactgcggaaaattcagcttga

SEQ ID NO: 27073 - DNA, 36 bp, synthetic construct
  misc_feature 1..36: note = Synthetic oligonucleotide
  source 1..36: mol_type = other DNA
gtcgcaacgactgtctgaaatcagtttaattgaaac

SEQ ID NO: 27074 - DNA, 37 bp, synthetic construct
  misc_feature 1..37: note = Synthetic oligonucleotide
  source 1..37: mol_type = other DNA
gtcgcaagtgactgcaagaaatcagtttgattgaaac

SEQ ID NO: 27075 - DNA, 37 bp, synthetic construct
  misc_feature 1..37: note = Synthetic oligonucleotide
  source 1..37: mol_type = other DNA
gtcgcaatgactgtttgagaatcagcttgattgaaac

SEQ ID NO: 27076 - DNA, 33 bp, synthetic construct
  misc_feature 1..33: note = Synthetic oligonucleotide
  source 1..33: mol_type = other DNA
gtcgcaccccacccggggtgcgtggattgaaac

SEQ ID NO: 27077 - DNA, 33 bp, synthetic construct; identical to SEQ ID NO: 12419
  misc_feature 1..33: note = Synthetic oligonucleotide
  source 1..33: mol_type = other DNA

SEQ ID NO: 27078 - DNA, 32 bp, synthetic construct
  misc_feature 1..32: note = Synthetic oligonucleotide
  source 1..32: mol_type = other DNA
gtcgcaccccgcgtgggtgcgtggattgaaac

SEQ ID NO: 27079 - DNA, 31 bp, synthetic construct
  misc_feature 1..31: note = Synthetic oligonucleotide
  source 1..31: mol_type = other DNA
gtcgcactctcacgagtgcgtggattgaaac

SEQ ID NO: 27080 - DNA, 31 bp, synthetic construct; identical to SEQ ID NO: 27079
  misc_feature 1..31: note = Synthetic oligonucleotide
  source 1..31: mol_type = other DNA

SEQ ID NO: 27081 - DNA, 31 bp, synthetic construct; identical to SEQ ID NO: 27079
  misc_feature 1..31: note = Synthetic oligonucleotide
  source 1..31: mol_type = other DNA

SEQ ID NO: 27082 - DNA, 31 bp, synthetic construct; identical to SEQ ID NO: 27079
  misc_feature 1..31: note = Synthetic oligonucleotide
  source 1..31: mol_type = other DNA

SEQ ID NO: 27083 - DNA, 36 bp, synthetic construct
  misc_feature 1..36: note = Synthetic oligonucleotide
  source 1..36: mol_type = other DNA
gtcgcagtgtgcttcccgcagcggttcagcggacac

SEQ ID NO: 27084 - DNA, 33 bp, synthetic construct
  misc_feature 1..33: note = Synthetic oligonucleotide
  source 1..33: mol_type = other DNA
gtcgccccacgcgagtggggcgtggattgaagg

SEQ ID NO: 27085 - DNA, 32 bp, synthetic construct
  misc_feature 1..32: note = Synthetic oligonucleotide
  source 1..32: mol_type = other DNA
gtcgccctccgtgcgagggcgcggattgaaac

SEQ ID NO: 27086 - DNA, 36 bp, synthetic construct
  misc_feature 1..36: note = Synthetic oligonucleotide
  source 1..36: mol_type = other DNA
gtcgcggattgctcgcaggccggggttagttacact

SEQ ID NO: 27087 - DNA, 36 bp, synthetic construct
  misc_feature 1..36: note = Synthetic oligonucleotide
  source 1..36: mol_type = other DNA
gtcgcggattgctcgcaggctggggtctgttacact

SEQ ID NO: 27088 - DNA, 36 bp, synthetic construct
  misc_feature 1..36: note = Synthetic oligonucleotide
  source 1..36: mol_type = other DNA
gtcgggaatcgtcaccagctagcccccgatagactt

SEQ ID NO: 27089 - DNA, 36 bp, synthetic construct
  misc_feature 1..36: note = Synthetic oligonucleotide
  source 1..36: mol_type = other DNA
gtcgtagttcccaatttcctctcgtagtggtataat

SEQ ID NO: 27090 - DNA, 36 bp, synthetic construct; identical to SEQ ID NO: 12424
  misc_feature 1..36: note = Synthetic oligonucleotide
  source 1..36: mol_type = other DNA

SEQ ID NO: 27091 - DNA, 36 bp, synthetic construct; identical to SEQ ID NO: 12424
  misc_feature 1..36: note = Synthetic oligonucleotide
  source 1..36: mol_type = other DNA

SEQ ID NO: 27092 - DNA, 36 bp, synthetic construct; identical to SEQ ID NO: 12424
  misc_feature 1..36: note = Synthetic oligonucleotide
  source 1..36: mol_type = other DNA

SEQ ID NO: 27093 - DNA, 36 bp, synthetic construct; identical to SEQ ID NO: 12424
  misc_feature 1..36: note = Synthetic oligonucleotide
  source 1..36: mol_type = other DNA

SEQ ID NO: 27094 - DNA, 36 bp, synthetic construct; identical to SEQ ID NO: 12424
  misc_feature 1..36: note = Synthetic oligonucleotide
  source 1..36: mol_type = other DNA

SEQ ID NO: 27095 - DNA, 36 bp, synthetic construct; identical to SEQ ID NO: 12424
  misc_feature 1..36: note = Synthetic oligonucleotide
  source 1..36: mol_type = other DNA

SEQ ID NO: 27096 - DNA, 36 bp, synthetic construct; identical to SEQ ID NO: 12424
  misc_feature 1..36: note = Synthetic oligonucleotide
  source 1..36: mol_type = other DNA

SEQ ID NO: 27097 - DNA, 36 bp, synthetic construct; identical to SEQ ID NO: 12424
  misc_feature 1..36: note = Synthetic oligonucleotide
  source 1..36: mol_type = other DNA

SEQ ID NO: 27098 - DNA, 36 bp, synthetic construct; identical to SEQ ID NO: 12424
  misc_feature 1..36: note = Synthetic oligonucleotide
  source 1..36: mol_type = other DNA

SEQ ID NO: 27099 - DNA, 36 bp, synthetic construct; identical to SEQ ID NO: 12424
  misc_feature 1..36: note = Synthetic oligonucleotide
  source 1..36: mol_type = other DNA

SEQ ID NO: 27100 - DNA, 36 bp, synthetic construct; identical to SEQ ID NO: 12424
  misc_feature 1..36: note = Synthetic oligonucleotide
  source 1..36: mol_type = other DNA

SEQ ID NO: 27101 - DNA, 36 bp, synthetic construct; identical to SEQ ID NO: 12424
  misc_feature 1..36: note = Synthetic oligonucleotide
  source 1..36: mol_type = other DNA

SEQ ID NO: 27102 - DNA, 36 bp, synthetic construct
  misc_feature 1..36: note = Synthetic oligonucleotide
  source 1..36: mol_type = other DNA
gtcgtagttccccattttctctcgtagtggtataac

SEQ ID NO: 27103 - DNA, 36 bp, synthetic construct; identical to SEQ ID NO: 12429
  misc_feature 1..36: note = Synthetic oligonucleotide
  source 1..36: mol_type = other DNA

SEQ ID NO: 27104 - DNA, 36 bp, synthetic construct; identical to SEQ ID NO: 12429
  misc_feature 1..36: note = Synthetic oligonucleotide
  source 1..36: mol_type = other DNA

SEQ ID NO: 27105 - DNA, 36 bp, synthetic construct; identical to SEQ ID NO: 12429
  misc_feature 1..36: note = Synthetic oligonucleotide
  source 1..36: mol_type = other DNA

SEQ ID NO: 27106 - DNA, 36 bp, synthetic construct; identical to SEQ ID NO: 12429
  misc_feature 1..36: note = Synthetic oligonucleotide
  source 1..36: mol_type = other DNA

SEQ ID NO: 27107 - DNA, 36 bp, synthetic construct; identical to SEQ ID NO: 12429
  misc_feature 1..36: note = Synthetic oligonucleotide
  source 1..36: mol_type = other DNA

SEQ ID NO: 27108 - DNA, 36 bp, synthetic construct
  misc_feature 1..36: note = Synthetic oligonucleotide
  source 1..36: mol_type = other DNA
gtcgtatgtcttcttcattctacatcaaaccacaac

SEQ ID NO: 27109 - DNA, 36 bp, synthetic construct
  misc_feature 1..36: note = Synthetic oligonucleotide
  source 1..36: mol_type = other DNA
gtcgtgctttccctccaaaatactctgtgctagagt

SEQ ID NO: 27110 - DNA, 34 bp, synthetic construct; identical to SEQ ID NO: 12433
  misc_feature 1..34: note = Synthetic oligonucleotide
  source 1..34: mol_type = other DNA

SEQ ID NO: 27111 - DNA, 36 bp, synthetic construct
  misc_feature 1..36: note = Synthetic oligonucleotide
  source 1..36: mol_type = other DNA
gtctataaaacatttgtaatttctactattgtagat

SEQ ID NO: 27112 - DNA, 37 bp, synthetic construct
  misc_feature 1..37: note = Synthetic oligonucleotide
  source 1..37: mol_type = other DNA
gtctcaacggagttgagaagttcagggtggctgaaac

SEQ ID NO: 27113 - DNA, 37 bp, synthetic construct; identical to SEQ ID NO: 27112
  misc_feature 1..37: note = Synthetic oligonucleotide
  source 1..37: mol_type = other DNA

SEQ ID NO: 27114 - DNA, 37 bp, synthetic construct; identical to SEQ ID NO: 27112
  misc_feature 1..37: note = Synthetic oligonucleotide
  source 1..37: mol_type = other DNA

SEQ ID NO: 27115 - DNA, 37 bp, synthetic construct; identical to SEQ ID NO: 27112
  misc_feature 1..37: note = Synthetic oligonucleotide
  source 1..37: mol_type = other DNA

SEQ ID NO: 27116 - DNA, 37 bp, synthetic construct; identical to SEQ ID NO: 27112
  misc_feature 1..37: note = Synthetic oligonucleotide
  source 1..37: mol_type = other DNA

SEQ ID NO: 27117 - DNA, 37 bp, synthetic construct
  misc_feature 1..37: note = Synthetic oligonucleotide
  source 1..37: mol_type = other DNA
gtctcaacggagttgagatgttcagggtgactgaaac

SEQ ID NO: 27118 - DNA, 33 bp, synthetic construct
  misc_feature 1..33: note = Synthetic oligonucleotide
  source 1..33: mol_type = other DNA
gtctcaccccgcaaggggtgagtgaattgtaac

SEQ ID NO: 27119 - DNA, 36 bp, synthetic construct
  misc_feature 1..36: note = Synthetic oligonucleotide
  source 1..36: mol_type = other DNA
gtctcaggtagatgtcagatcaatcagttcaagaac

SEQ ID NO: 27120 - DNA, 36 bp, synthetic construct; identical to SEQ ID NO: 12436
  misc_feature 1..36: note = Synthetic oligonucleotide
  source 1..36: mol_type = other DNA

SEQ ID NO: 27121 - DNA, 36 bp, synthetic construct; identical to SEQ ID NO: 12436
  misc_feature 1..36: note = Synthetic oligonucleotide
  source 1..36: mol_type = other DNA

SEQ ID NO: 27122 - DNA, 36 bp, synthetic construct; identical to SEQ ID NO: 12436
  misc_feature 1..36: note = Synthetic oligonucleotide
  source 1..36: mol_type = other DNA

SEQ ID NO: 27123 - DNA, 36 bp, synthetic construct
  misc_feature 1..36: note = Synthetic oligonucleotide
  source 1..36: mol_type = other DNA
gtctgacacctatacaaattaacaaggctctcaaac

SEQ ID NO: 27124 - DNA, 36 bp, synthetic construct; identical to SEQ ID NO: 12440
  misc_feature 1..36: note = Synthetic oligonucleotide
  source 1..36: mol_type = other DNA

SEQ ID NO: 27125 - DNA, 36 bp, synthetic construct
  misc_feature 1..36: note = Synthetic oligonucleotide
  source 1..36: mol_type = other DNA
gtctggggctcgtgtgttcttaaatgggtgtcggac

SEQ ID NO: 27126 - DNA, 36 bp, synthetic construct
  misc_feature 1..36: note = Synthetic oligonucleotide
  source 1..36: mol_type = other DNA
gtctgggtttggccgcgaggcttcttctgctagaac

SEQ ID NO: 27127 - DNA, 36 bp, synthetic construct
  misc_feature 1..36: note = Synthetic oligonucleotide
  source 1..36: mol_type = other DNA
gtctggttgaccccgcagtcctgaagtcacacactc

SEQ ID NO: 27128 - DNA, 36 bp, synthetic construct
  misc_feature 1..36: note = Synthetic oligonucleotide
  source 1..36: mol_type = other DNA
gtcttaatctagcaaaaatccatatggtaacaaaac

SEQ ID NO: 27129 - DNA, 36 bp, synthetic construct
  misc_feature 1..36: note = Synthetic oligonucleotide
  source 1..36: mol_type = other DNA
gtcttagcagagaaaacgtcgaggccaaaccgcaac

SEQ ID NO: 27130 - DNA, 36 bp, synthetic construct
  misc_feature 1..36: note = Synthetic oligonucleotide
  source 1..36: mol_type = other DNA
gtcttagcagagaaaacgtcgaggcccaaccgcaac

SEQ ID NO: 27131 - DNA, 36 bp, synthetic construct
  misc_feature 1..36: note = Synthetic oligonucleotide
  source 1..36: mol_type = other DNA
gtcttagcagagatagccgcagggccaaaccggaac

SEQ ID NO: 27132 - DNA, 36 bp, synthetic construct
  misc_feature 1..36: note = Synthetic oligonucleotide
  source 1..36: mol_type = other DNA
gtcttagtacctatgtagattacattactctcaaac

SEQ ID NO: 27133 - DNA, 36 bp, synthetic construct
  misc_feature 1..36: note = Synthetic oligonucleotide
  source 1..36: mol_type = other DNA
gtcttatacctctatgaatttacattactctcaaac

SEQ ID NO: 27134 - DNA, 36 bp, synthetic construct; identical to SEQ ID NO: 27133
  misc_feature 1..36: note = Synthetic oligonucleotide
  source 1..36: mol_type = other DNA

SEQ ID NO: 27135 - DNA, 36 bp, synthetic construct
  misc_feature 1..36: note = Synthetic oligonucleotide
  source 1..36: mol_type = other DNA
gtcttatattactcaaaattaacagggtactgtaac

SEQ ID NO: 27136 - DNA, 36 bp, synthetic construct
  misc_feature 1..36: note = Synthetic oligonucleotide
  source 1..36: mol_type = other DNA
gtcttatcctagcaaaaattcatatggtaacaaaac

SEQ ID NO: 27137 - DNA, 36 bp, synthetic construct; identical to SEQ ID NO: 12452
  misc_feature 1..36: note = Synthetic oligonucleotide
  source 1..36: mol_type = other DNA

SEQ ID NO: 27138 - DNA, 36 bp, synthetic construct; identical to SEQ ID NO: 12452
  misc_feature 1..36: note = Synthetic oligonucleotide
  source 1..36: mol_type = other DNA

SEQ ID NO: 27139 - DNA, 36 bp, synthetic construct; identical to SEQ ID NO: 12452
  misc_feature 1..36: note = Synthetic oligonucleotide
  source 1..36: mol_type = other DNA

SEQ ID NO: 27140 - DNA, 36 bp, synthetic construct; identical to SEQ ID NO: 12452
  misc_feature 1..36: note = Synthetic oligonucleotide
  source 1..36: mol_type = other DNA

SEQ ID NO: 27141 - DNA, 36 bp, synthetic construct
  misc_feature 1..36: note = Synthetic oligonucleotide
  source 1..36: mol_type = other DNA
gtcttgagcacgcgcccttccccaaggtgatacgct

SEQ ID NO: 27142 - DNA, 36 bp, synthetic construct; identical to SEQ ID NO: 27141
  misc_feature 1..36: note = Synthetic oligonucleotide
  source 1..36: mol_type = other DNA

SEQ ID NO: 27143 - DNA, 36 bp, synthetic construct; identical to SEQ ID NO: 27141
  misc_feature 1..36: note = Synthetic oligonucleotide
  source 1..36: mol_type = other DNA

SEQ ID NO: 27144 - DNA, 36 bp, synthetic construct; identical to SEQ ID NO: 27141
  misc_feature 1..36: note = Synthetic oligonucleotide
  source 1..36: mol_type = other DNA

SEQ ID NO: 27145 - DNA, 36 bp, synthetic construct; identical to SEQ ID NO: 27141
  misc_feature 1..36: note = Synthetic oligonucleotide
  source 1..36: mol_type = other DNA

SEQ ID NO: 27146 - DNA, 36 bp, synthetic construct; identical to SEQ ID NO: 27141
  misc_feature 1..36: note = Synthetic oligonucleotide
  source 1..36: mol_type = other DNA

SEQ ID NO: 27147 - DNA, 36 bp, synthetic construct
  misc_feature 1..36: note = Synthetic oligonucleotide
  source 1..36: mol_type = other DNA
gtcttgagcacgcgcccttcgccaaggtgatacgct

SEQ ID NO: 27148 - DNA, 36 bp, synthetic construct
  misc_feature 1..36: note = Synthetic oligonucleotide
  source 1..36: mol_type = other DNA
gtcttgagcacgcggccttccccaaggcgatacgct

SEQ ID NO: 27149 - DNA, 36 bp, synthetic construct
  misc_feature 1..36: note = Synthetic oligonucleotide
  source 1..36: mol_type = other DNA
gtcttgattaccatacgatctcccaggtagtaaaat

SEQ ID NO: 27150 - DNA, 36 bp, synthetic construct; identical to SEQ ID NO: 12455
  misc_feature 1..36: note = Synthetic oligonucleotide
  source 1..36: mol_type = other DNA

SEQ ID NO: 27151 - DNA, 36 bp, synthetic construct
  misc_feature 1..36: note = Synthetic oligonucleotide
  source 1..36: mol_type = other DNA
gtcttgattaccgtacgatttcccaggtagtaaaat

SEQ ID NO: 27152 - DNA, 36 bp, synthetic construct
  misc_feature 1..36: note = Synthetic oligonucleotide
  source 1..36: mol_type = other DNA
gtctttacatagcaaaaattgtgagggtagcaaaac

SEQ ID NO: 27153 - DNA, 36 bp, synthetic construct; identical to SEQ ID NO: 27152
  misc_feature 1..36: note = Synthetic oligonucleotide
  source 1..36: mol_type = other DNA

SEQ ID NO: 27154 - DNA, 36 bp, synthetic construct
  misc_feature 1..36: note = Synthetic oligonucleotide
  source 1..36: mol_type = other DNA
gtctttgtttgccaataaacgtctgagaactaaaac

SEQ ID NO: 27155 - DNA, 36 bp, synthetic construct
  misc_feature 1..36: note = Synthetic oligonucleotide
  source 1..36: mol_type = other DNA
gtgaaagcaccttctagtttgtcaatattctcaaac

SEQ ID NO: 27156 - DNA, 34 bp, synthetic construct
  misc_feature 1..34: note = Synthetic oligonucleotide
  source 1..34: mol_type = other DNA
gtgcaaagataagaattttcagacaaatcacaac

SEQ ID NO: 27157 - DNA, 34 bp, synthetic construct; identical to SEQ ID NO: 27156
  misc_feature 1..34: note = Synthetic oligonucleotide
  source 1..34: mol_type = other DNA

SEQ ID NO: 27158 - DNA, 37 bp, synthetic construct; identical to SEQ ID NO: 12466
  misc_feature 1..37: note = Synthetic oligonucleotide
  source 1..37: mol_type = other DNA

SEQ ID NO: 27159 - DNA, 37 bp, synthetic construct; identical to SEQ ID NO: 12466
  misc_feature 1..37: note = Synthetic oligonucleotide
  source 1..37: mol_type = other DNA

SEQ ID NO: 27160 - DNA, 37 bp, synthetic construct; identical to SEQ ID NO: 12466
  misc_feature 1..37: note = Synthetic oligonucleotide
  source 1..37: mol_type = other DNA

SEQ ID NO: 27161 - DNA, 36 bp, synthetic construct
  misc_feature 1..36: note = Synthetic oligonucleotide
  source 1..36: mol_type = other DNA
gtgctgctaaaatacaatttgaaagcaatacacaac

SEQ ID NO: 27162 - DNA, 33 bp, synthetic construct
  misc_feature 1..33: note = Synthetic oligonucleotide
  source 1..33: mol_type = other DNA
gtgctgctaaaatacaatttgaaagcaattcac

SEQ ID NO: 27163 - DNA, 36 bp, synthetic construct
  misc_feature 1..36: note = Synthetic oligonucleotide
  source 1..36: mol_type = other DNA
gtgctgctaaaatacaatttgaaagcaattcacaac

SEQ ID NO: 27164 - DNA, 36 bp, synthetic construct
  misc_feature 1..36: note = Synthetic oligonucleotide
  source 1..36: mol_type = other DNA
gtggcaaccgcatgaaagaatcagtttgattgaaac

SEQ ID NO: 27165 - DNA, 36 bp, synthetic construct
  misc_feature 1..36: note = Synthetic oligonucleotide
  source 1..36: mol_type = other DNA
gtggtcaaagtcattgatctgacaggcatctgaaac

SEQ ID NO: 27166 - DNA, 36 bp, synthetic construct; identical to SEQ ID NO: 27165
  misc_feature 1..36: note = Synthetic oligonucleotide
  source 1..36: mol_type = other DNA

SEQ ID NO: 27167 - DNA, 36 bp, synthetic construct; identical to SEQ ID NO: 27165
  misc_feature 1..36: note = Synthetic oligonucleotide
  source 1..36: mol_type = other DNA

SEQ ID NO: 27168 - DNA, 36 bp, synthetic construct; identical to SEQ ID NO: 27165
  misc_feature 1..36: note = Synthetic oligonucleotide
  source 1..36: mol_type = other DNA

SEQ ID NO: 27169 - DNA, 36 bp, synthetic construct; identical to SEQ ID NO: 27165
  misc_feature 1..36: note = Synthetic oligonucleotide
  source 1..36: mol_type = other DNA

SEQ ID NO: 27170 - DNA, 36 bp, synthetic construct; identical to SEQ ID NO: 27165
  misc_feature 1..36: note = Synthetic oligonucleotide
  source 1..36: mol_type = other DNA

SEQ ID NO: 27171 - DNA, 36 bp, synthetic construct; identical to SEQ ID NO: 27165
  misc_feature 1..36: note = Synthetic oligonucleotide
  source 1..36: mol_type = other DNA

SEQ ID NO: 27172 - DNA, 36 bp, synthetic construct; identical to SEQ ID NO: 27165
  misc_feature 1..36: note = Synthetic oligonucleotide
  source 1..36: mol_type = other DNA

SEQ ID NO: 27173 - DNA, 36 bp, synthetic construct; identical to SEQ ID NO: 27165
  misc_feature 1..36: note = Synthetic oligonucleotide
  source 1..36: mol_type = other DNA

SEQ ID NO: 27174 - DNA, 36 bp, synthetic construct; identical to SEQ ID NO: 27165
  misc_feature 1..36: note = Synthetic oligonucleotide
  source 1..36: mol_type = other DNA

SEQ ID NO: 27175 - DNA, 36 bp, synthetic construct; identical to SEQ ID NO: 27165
  misc_feature 1..36: note = Synthetic oligonucleotide
  source 1..36: mol_type = other DNA

SEQ ID NO: 27176 - DNA, 36 bp, synthetic construct
  misc_feature 1..36: note = Synthetic oligonucleotide
  source 1..36: mol_type = other DNA
gtggtctaggtcattgatctgacaggcttctgaaac

SEQ ID NO: 27177 - DNA, 36 bp, synthetic construct; identical to SEQ ID NO: 27176
  misc_feature 1..36: note = Synthetic oligonucleotide
  source 1..36: mol_type = other DNA

SEQ ID NO: 27178 - DNA, 36 bp, synthetic construct; identical to SEQ ID NO: 27176
  misc_feature 1..36: note = Synthetic oligonucleotide
  source 1..36: mol_type = other DNA

SEQ ID NO: 27179 - DNA, 36 bp, synthetic construct; identical to SEQ ID NO: 27176
  misc_feature 1..36: note = Synthetic oligonucleotide
  source 1..36: mol_type = other DNA

SEQ ID NO: 27180 - DNA, 36 bp, synthetic construct; identical to SEQ ID NO: 27176
  misc_feature 1..36: note = Synthetic oligonucleotide
  source 1..36: mol_type = other DNA

SEQ ID NO: 27181 - DNA, 36 bp, synthetic construct; identical to SEQ ID NO: 27176
  misc_feature 1..36: note = Synthetic oligonucleotide
  source 1..36: mol_type = other DNA

SEQ ID NO: 27182 - DNA, 36 bp, synthetic construct; identical to SEQ ID NO: 27176
  misc_feature 1..36: note = Synthetic oligonucleotide
  source 1..36: mol_type = other DNA

SEQ ID NO: 27183 - DNA, 36 bp, synthetic construct; identical to SEQ ID NO: 27176
  misc_feature 1..36: note = Synthetic oligonucleotide
  source 1..36: mol_type = other DNA

SEQ ID NO: 27184 - DNA, 37 bp, synthetic construct
  misc_feature 1..37: note = Synthetic oligonucleotide
  source 1..37: mol_type = other DNA
gtggtctaggtcattgatctgacaggcttctgaaacc

SEQ ID NO: 27185 - DNA, 36 bp, synthetic construct
  misc_feature 1..36: note = Synthetic oligonucleotide
  source 1..36: mol_type = other DNA
gtgtaagtttatcaatatccaacagagtactaaaac

SEQ ID NO: 27186 - DNA, 36 bp, synthetic construct; identical to SEQ ID NO: 27185
  misc_feature 1..36: note = Synthetic oligonucleotide
  source 1..36: mol_type = other DNA

SEQ ID NO: 27187 - DNA, 35 bp, synthetic construct
  misc_feature 1..35: note = Synthetic oligonucleotide
  source 1..35: mol_type = other DNA
gtgtacttgagcggtgaatcccggccatccctagc

SEQ ID NO: 27188 - DNA, 35 bp, synthetic construct
  misc_feature 1..35: note = Synthetic oligonucleotide
  source 1..35: mol_type = other DNA
gtgtgaaggtacggaatctgaaagctaatcacaac

SEQ ID NO: 27189 - DNA, 36 bp, synthetic construct
  misc_feature 1..36: note = Synthetic oligonucleotide
  source 1..36: mol_type = other DNA
gtgtgtgttgtatttgttttagcaataccctcaaac

SEQ ID NO: 27190 - DNA, 36 bp, synthetic construct
  misc_feature 1..36: note = Synthetic oligonucleotide
  source 1..36: mol_type = other DNA
gtgtgtgttgtatttgttttagcaatactctcaaac

SEQ ID NO: 27191 - DNA, 31 bp, synthetic construct
  misc_feature 1..31: note = Synthetic oligonucleotide
  source 1..31: mol_type = other DNA
gtgttaatttatcctttataggaattgacgc

SEQ ID NO: 27192 - DNA, 36 bp, synthetic construct
  misc_feature 1..36: note = Synthetic oligonucleotide
  source 1..36: mol_type = other DNA
gtgttacattaatcagattttccagcaccttaaaac

SEQ ID NO: 27193 - DNA, 29 bp, synthetic construct
  misc_feature 1..29: note = Synthetic oligonucleotide
  source 1..29: mol_type = other DNA
gtgttccccgcagtcgtggggataacccg

SEQ ID NO: 27194 - DNA, 29 bp, synthetic construct
  misc_feature 1..29: note = Synthetic oligonucleotide
  source 1..29: mol_type = other DNA
gtgttccccgcatgcgcggggatgagccg

SEQ ID NO: 27195 - DNA, 28 bp, synthetic construct
  misc_feature 1..28: note = Synthetic oligonucleotide
  source 1..28: mol_type = other DNA
gtgttccccgcttatgcggggttgtctc

SEQ ID NO: 27196 - DNA, 36 bp, synthetic construct; identical to SEQ ID NO: 12479
  misc_feature 1..36: note = Synthetic oligonucleotide
  source 1..36: mol_type = other DNA

SEQ ID NO: 27197 - DNA, 35 bp, synthetic construct
  misc_feature 1..35: note = Synthetic oligonucleotide
  source 1..35: mol_type = other DNA
gttaaattaaataatccccattaggggacggaaac

SEQ ID NO: 27198 - DNA, 36 bp, synthetic construct
  misc_feature 1..36: note = Synthetic oligonucleotide
  source 1..36: mol_type = other DNA
gttacacattactaagatttatttgtttattgaaag

SEQ ID NO: 27199 - DNA, 36 bp, synthetic construct
  misc_feature 1..36: note = Synthetic oligonucleotide
  source 1..36: mol_type = other DNA
gttacagaccgacctgtttttcgagttaactaaatt

SEQ ID NO: 27200 - DNA, 36 bp, synthetic construct
  misc_feature 1..36: note = Synthetic oligonucleotide
  source 1..36: mol_type = other DNA
gttacagcttgacaccaaaacatgattttctaaatt

SEQ ID NO: 27201 - DNA, 34 bp, synthetic construct
  misc_feature 1..34: note = Synthetic oligonucleotide
  source 1..34: mol_type = other DNA
gttacagcttgacaccaaaacctgattttctaaa

SEQ ID NO: 27202 - DNA, 36 bp, synthetic construct
  misc_feature 1..36: note = Synthetic oligonucleotide
  source 1..36: mol_type = other DNA
gttacagcttgacaccaaaacgcgtttgaatagact

SEQ ID NO: 27203 - DNA, 36 bp, synthetic construct; identical to SEQ ID NO: 27202
  misc_feature 1..36: note = Synthetic oligonucleotide
  source 1..36: mol_type = other DNA

SEQ ID NO: 27204 - DNA, 36 bp, synthetic construct; identical to SEQ ID NO: 12487
  misc_feature 1..36: note = Synthetic oligonucleotide
  source 1..36: mol_type = other DNA

SEQ ID NO: 27205 - DNA, 36 bp, synthetic construct; identical to SEQ ID NO: 12487
  misc_feature 1..36: note = Synthetic oligonucleotide
  source 1..36: mol_type = other DNA

SEQ ID NO: 27206 - DNA, 36 bp, synthetic construct
  misc_feature 1..36: note = Synthetic oligonucleotide
  source 1..36: mol_type = other DNA
gttaccaaagtgcccttttgggggcgagatcaaaac

SEQ ID NO: 27207 - DNA, 26 bp, synthetic construct
  misc_feature 1..26: note = Synthetic oligonucleotide
  source 1..26: mol_type = other DNA
gttacctccacacttgctaatacagc

SEQ ID NO: 27208 - DNA, 26 bp, synthetic construct
  misc_feature 1..26: note = Synthetic oligonucleotide
  source 1..26: mol_type = other DNA
gttacctccacacttgctaatacagc

SEQ ID NO: 27209 - DNA, 31 bp, synthetic construct
  misc_feature 1..31: note = Synthetic oligonucleotide
  source 1..31: mol_type = other DNA
gttacgcacctcgattggagattgttacatt

SEQ ID NO: 27210 - DNA, 31 bp, synthetic construct; identical to SEQ ID NO: 27209
  misc_feature 1..31: note = Synthetic oligonucleotide
  source 1..31: mol_type = other DNA

SEQ ID NO: 27211 - DNA, 36 bp, synthetic construct
  misc_feature 1..36: note = Synthetic oligonucleotide
  source 1..36: mol_type = other DNA
gttacggctaccataccgatcagtatctgctacact

SEQ ID NO: 27212 - DNA, 37 bp, synthetic construct
  misc_feature 1..37: note = Synthetic oligonucleotide
  source 1..37: mol_type = other DNA
gttacggctgccataccgatcagcatctgctacactc

SEQ ID NO: 27213 - DNA, 36 bp, synthetic construct
  misc_feature 1..36: note = Synthetic oligonucleotide
  source 1..36: mol_type = other DNA
gttacggctggacaccatcttttagtacgctataat

SEQ ID NO: 27214 - DNA, 36 bp, synthetic construct
  misc_feature 1..36: note = Synthetic oligonucleotide
  source 1..36: mol_type = other DNA
gttacggtaccctgtaatttttaggtaatgcttatg

SEQ ID NO: 27215 - DNA, 36 bp, synthetic construct
  misc_feature 1..36: note = Synthetic oligonucleotide
  source 1..36: mol_type = other DNA
gttacggtatcctgtaatttttaggtaatgtaagac

SEQ ID NO: 27216 - DNA, 36 bp, synthetic construct
  misc_feature 1..36: note = Synthetic oligonucleotide
  source 1..36: mol_type = other DNA
gttagagaatagtgtaaatctataaggtagtaaaac

SEQ ID NO: 27217 - DNA, 36 bp, synthetic construct
  misc_feature 1..36: note = Synthetic oligonucleotide
  source 1..36: mol_type = other DNA
gttagagatactcataagataacattactctcaaac

SEQ ID NO: 27218 - DNA, 36 bp, synthetic construct; identical to SEQ ID NO: 27217
  misc_feature 1..36: note = Synthetic oligonucleotide
  source 1..36: mol_type = other DNA

SEQ ID NO: 27219 - DNA, 36 bp, synthetic construct; identical to SEQ ID NO: 27217
  misc_feature 1..36: note = Synthetic oligonucleotide
  source 1..36: mol_type = other DNA

SEQ ID NO: 27220 - DNA, 36 bp, synthetic construct; identical to SEQ ID NO: 27217
  misc_feature 1..36: note = Synthetic oligonucleotide
  source 1..36: mol_type = other DNA

SEQ ID NO: 27221 - DNA, 36 bp, synthetic construct; identical to SEQ ID NO: 27217
  misc_feature 1..36: note = Synthetic oligonucleotide
  source 1..36: mol_type = other DNA

SEQ ID NO: 27222 - DNA, 36 bp, synthetic construct; identical to SEQ ID NO: 27217
  misc_feature 1..36: note = Synthetic oligonucleotide
  source 1..36: mol_type = other DNA

SEQ ID NO: 27223 - DNA, 36 bp, synthetic construct; identical to SEQ ID NO: 27217
  misc_feature 1..36: note = Synthetic oligonucleotide
  source 1..36: mol_type = other DNA

SEQ ID NO: 27224 - DNA, 36 bp, synthetic construct; identical to SEQ ID NO: 27217
  misc_feature 1..36: note = Synthetic oligonucleotide
  source 1..36: mol_type = other DNA

SEQ ID NO: 27225 - DNA, 36 bp, synthetic construct; identical to SEQ ID NO: 27217
  misc_feature 1..36: note = Synthetic oligonucleotide
  source 1..36: mol_type = other DNA

SEQ ID NO: 27226 - DNA, 36 bp, synthetic construct
  misc_feature 1..36: note = Synthetic oligonucleotide
  source 1..36: mol_type = other DNA
gttagggttgcccaatgaaatcagatttcgtttaat

SEQ ID NO: 27227 - DNA, 36 bp, synthetic construct
  misc_feature 1..36: note = Synthetic oligonucleotide
  source 1..36: mol_type = other DNA
gttaggtaaccatcttaaacaacacaactctcaaac

SEQ ID NO: 27228 - DNA, 32 bp, synthetic construct
  misc_feature 1..32: note = Synthetic oligonucleotide
  source 1..32: mol_type = other DNA
gttataacttacgcatatctgcggattgaaga

SEQ ID NO: 27229 - DNA, 36 bp, synthetic construct
  misc_feature 1..36: note = Synthetic oligonucleotide
  source 1..36: mol_type = other DNA
gttataacttgctctcaaattcatatctgctataat

SEQ ID NO: 27230 - DNA, 36 bp, synthetic construct; identical to SEQ ID NO: 27229
  misc_feature 1..36: note = Synthetic oligonucleotide
  source 1..36: mol_type = other DNA

SEQ ID NO: 27231 - DNA, 36 bp, synthetic construct
  misc_feature 1..36: note = Synthetic oligonucleotide
  source 1..36: mol_type = other DNA
gttataacttgctctcaatttcatatctgctataat

SEQ ID NO: 27232 - DNA, 36 bp, synthetic construct; identical to SEQ ID NO: 27231
  misc_feature 1..36: note = Synthetic oligonucleotide
  source 1..36: mol_type = other DNA

SEQ ID NO: 27233 - DNA, 36 bp, synthetic construct; identical to SEQ ID NO: 27231
  misc_feature 1..36: note = Synthetic oligonucleotide
  source 1..36: mol_type = other DNA

SEQ ID NO: 27234 - DNA, 36 bp, synthetic construct; identical to SEQ ID NO: 12505
  misc_feature 1..36: note = Synthetic oligonucleotide
  source 1..36: mol_type = other DNA

SEQ ID NO: 27235 - DNA, 36 bp, synthetic construct
  misc_feature 1..36: note = Synthetic oligonucleotide
  source 1..36: mol_type = other DNA
gttatacagtagcggaagatggtcggtggctataac

SEQ ID NO: 27236 - DNA, 36 bp, synthetic construct; identical to SEQ ID NO: 12513
  misc_feature 1..36: note = Synthetic oligonucleotide
  source 1..36: mol_type = other DNA

SEQ ID NO: 27237 - DNA, 36 bp, synthetic construct
  misc_feature 1..36: note = Synthetic oligonucleotide
  source 1..36: mol_type = other DNA
gttataccataccaagaaaaattagggaactacaac

SEQ ID NO: 27238 - DNA, 36 bp, synthetic construct
  misc_feature 1..36: note = Synthetic oligonucleotide
  source 1..36: mol_type = other DNA
gttataccataccaagaaccatcagggagctataac

SEQ ID NO: 27239 - DNA, 36 bp, synthetic construct
  misc_feature 1..36: note = Synthetic oligonucleotide
  source 1..36: mol_type = other DNA
gttataccataccaagaatcgagagggaactacaac

SEQ ID NO: 27240 - DNA, 36 bp, synthetic construct
  misc_feature 1..36: note = Synthetic oligonucleotide
  source 1..36: mol_type = other DNA
gttatacttgactttcaaataattttgtgatactat

SEQ ID NO: 27241 - DNA, 36 bp, synthetic construct
  misc_feature 1..36: note = Synthetic oligonucleotide
  source 1..36: mol_type = other DNA
gttatagacccctccctctctctggtctgatatact

SEQ ID NO: 27242 - DNA, 28 bp, synthetic construct
  misc_feature 1..28: note = Synthetic oligonucleotide
  source 1..28: mol_type = other DNA
gttatagaccctggttatttccgggttg

SEQ ID NO: 27243 - DNA, 28 bp, synthetic construct
  misc_feature 1..28: note = Synthetic oligonucleotide
  source 1..28: mol_type = other DNA
gttatagaccctggttatttccgggttg

SEQ ID NO: 27244 - DNA, 36 bp, synthetic construct
  misc_feature 1..36: note = Synthetic oligonucleotide
  source 1..36: mol_type = other DNA
gttatagatccctccctctctctggtctgatatact

SEQ ID NO: 27245 - DNA, 36 bp, synthetic construct; identical to SEQ ID NO: 27244
  misc_feature 1..36: note = Synthetic oligonucleotide
  source 1..36: mol_type = other DNA

SEQ ID NO: 27246 - DNA, 36 bp, synthetic construct
  misc_feature 1..36: note = Synthetic oligonucleotide
  source 1..36: mol_type = other DNA
gttatagcaaatcagaaagtggtgtcaatccgcaac

SEQ ID NO: 27247 - DNA, 37 bp, synthetic construct; identical to SEQ ID NO: 12522
  misc_feature 1..37: note = Synthetic oligonucleotide
  source 1..37: mol_type = other DNA

SEQ ID NO: 27248 - DNA, 36 bp, synthetic construct
  misc_feature 1..36: note = Synthetic oligonucleotide
  source 1..36: mol_type = other DNA
gttatagcacctgttcccacacaagtatgctatact

SEQ ID NO: 27249 - DNA, 36 bp, synthetic construct
  misc_feature 1..36: note = Synthetic oligonucleotide
  source 1..36: mol_type = other DNA
gttatagcacctgttcccactcatatatgctataat

SEQ ID NO: 27250 - DNA, 36 bp, synthetic construct
  misc_feature 1..36: note = Synthetic oligonucleotide
  source 1..36: mol_type = other DNA
gttatagcagattagaaattggcgtcaaaccgcaac

SEQ ID NO: 27251 - DNA, 36 bp, synthetic construct
  misc_feature 1..36: note = Synthetic oligonucleotide
  source 1..36: mol_type = other DNA
gttatagcagttcagaaatcgcggtccagctgcaac

SEQ ID NO: 27252 - DNA, 36 bp, synthetic construct
  misc_feature 1..36: note = Synthetic oligonucleotide
  source 1..36: mol_type = other DNA
gttatagccaccgaccatcttccgatactgtataac

SEQ ID NO: 27253 - DNA, 36 bp, synthetic construct
  misc_feature 1..36: note = Synthetic oligonucleotide
  source 1..36: mol_type = other DNA
gttatagccaccggtcatcttccgatactgtatgac

SEQ ID NO: 27254 - DNA, 36 bp, synthetic construct; identical to SEQ ID NO: 12533
  misc_feature 1..36: note = Synthetic oligonucleotide
  source 1..36: mol_type = other DNA

SEQ ID NO: 27255 - DNA, 36 bp, synthetic construct
  misc_feature 1..36: note = Synthetic oligonucleotide
  source 1..36: mol_type = other DNA
gttatagcccccagccccattccgaagggttataat

SEQ ID NO: 27256 - DNA, 36 bp, synthetic construct; identical to SEQ ID NO: 12535
  misc_feature 1..36: note = Synthetic oligonucleotide
  source 1..36: mol_type = other DNA

SEQ ID NO: 27257 - DNA, 36 bp, synthetic construct
  misc_feature 1..36: note = Synthetic oligonucleotide
  source 1..36: mol_type = other DNA
gttatagccccctccctctctctggtctgatatact

SEQ ID NO: 27258 - DNA, 36 bp, synthetic construct
  misc_feature 1..36: note = Synthetic oligonucleotide
  source 1..36: mol_type = other DNA
gttatagccccctttctcactcggatacgctataat

SEQ ID NO: 27259 - DNA, 36 bp, synthetic construct
  misc_feature 1..36: note = Synthetic oligonucleotide
  source 1..36: mol_type = other DNA
gttatagccccctttctcactcggatacgctatact

SEQ ID NO: 27260 - DNA, 36 bp, synthetic construct; identical to SEQ ID NO: 27259
  misc_feature 1..36: note = Synthetic oligonucleotide
  source 1..36: mol_type = other DNA

SEQ ID NO: 27261 - DNA, 36 bp, synthetic construct; identical to SEQ ID NO: 27259
  misc_feature 1..36: note = Synthetic oligonucleotide
  source 1..36: mol_type = other DNA

SEQ ID NO: 27262 - DNA, 36 bp, synthetic construct; identical to SEQ ID NO: 27259
  misc_feature 1..36: note = Synthetic oligonucleotide
  source 1..36: mol_type = other DNA

SEQ ID NO: 27263 - DNA, 36 bp, synthetic construct; identical to SEQ ID NO: 27259
  misc_feature 1..36: note = Synthetic oligonucleotide
  source 1..36: mol_type = other DNA

SEQ ID NO: 27264 - DNA, 36 bp, synthetic construct; identical to SEQ ID NO: 27259
  misc_feature 1..36: note = Synthetic oligonucleotide
  source 1..36: mol_type = other DNA

SEQ ID NO: 27265 - DNA, 36 bp, synthetic construct; identical to SEQ ID NO: 27259
  misc_feature 1..36: note = Synthetic oligonucleotide
  source 1..36: mol_type = other DNA

SEQ ID NO: 27266 - DNA, 36 bp, synthetic construct; identical to SEQ ID NO: 12540
  misc_feature 1..36: note = Synthetic oligonucleotide
  source 1..36: mol_type = other DNA

SEQ ID NO: 27267 - DNA, 36 bp, synthetic construct; identical to SEQ ID NO: 12541
  misc_feature 1..36: note = Synthetic oligonucleotide
  source 1..36: mol_type = other DNA

SEQ ID NO: 27268 - DNA, 36 bp, synthetic construct
  misc_feature 1..36: note = Synthetic oligonucleotide
  source 1..36: mol_type = other DNA
gttatagcgcctgttcccacacaaatatgctataat

SEQ ID NO: 27269 - DNA, 36 bp, synthetic construct; identical to SEQ ID NO: 12545
  misc_feature 1..36: note = Synthetic oligonucleotide
  source 1..36: mol_type = other DNA

SEQ ID NO: 27270 - DNA, 36 bp, synthetic construct; identical to SEQ ID NO: 12545
  misc_feature 1..36: note = Synthetic oligonucleotide
  source 1..36: mol_type = other DNA

SEQ ID NO: 27271 - DNA, 36 bp, synthetic construct; identical to SEQ ID NO: 12545
  misc_feature 1..36: note = Synthetic oligonucleotide
  source 1..36: mol_type = other DNA

SEQ ID NO: 27272 - DNA, 36 bp, synthetic construct; identical to SEQ ID NO: 12545
  misc_feature 1..36: note = Synthetic oligonucleotide
  source 1..36: mol_type = other DNA

SEQ ID NO: 27273 - DNA, 36 bp, synthetic construct
  misc_feature 1..36: note = Synthetic oligonucleotide
  source 1..36: mol_type = other DNA
gttatagctccctgttagttcttggtatgaaataac

SEQ ID NO: 27274 - DNA, 36 bp, synthetic construct; identical to SEQ ID NO: 27273
  misc_feature 1..36: note = Synthetic oligonucleotide
  source 1..36: mol_type = other DNA

SEQ ID NO: 27275 - DNA, 36 bp, synthetic construct
  misc_feature 1..36: note = Synthetic oligonucleotide
  source 1..36: mol_type = other DNA
gttatagctccctttctcactcggatatgctataat

SEQ ID NO: 27276 - DNA, 37 bp, synthetic construct
  misc_feature 1..37: note = Synthetic oligonucleotide
  source 1..37: mol_type = other DNA
gttatagctcgttaacaatttaagtaatggtaaaatt

SEQ ID NO: 27277 - DNA, 36 bp, synthetic construct
  misc_feature 1..36: note = Synthetic oligonucleotide
  source 1..36: mol_type = other DNA
gttatagctctctgccacactccgaaatgctataat

SEQ ID NO: 27278 - DNA, 25 bp, synthetic construct
  misc_feature 1..25: note = Synthetic oligonucleotide
  source 1..25: mol_type = other DNA
gttatagcttcctttccaaatcaga

SEQ ID NO: 27279 - DNA, 36 bp, synthetic construct
  misc_feature 1..36: note = Synthetic oligonucleotide
  source 1..36: mol_type = other DNA
gttatagcttcctttccaaatcagatatgctataac

SEQ ID NO: 27280 - DNA, 36 bp, synthetic construct; identical to SEQ ID NO: 12549
  misc_feature 1..36: note = Synthetic oligonucleotide
  source 1..36: mol_type = other DNA

SEQ ID NO: 27281 - DNA, 36 bp, synthetic construct; identical to SEQ ID NO: 12549
  misc_feature 1..36: note = Synthetic oligonucleotide
  source 1..36: mol_type = other DNA

SEQ ID NO: 27282 - DNA, 36 bp, synthetic construct; identical to SEQ ID NO: 12549
  misc_feature 1..36: note = Synthetic oligonucleotide
  source 1..36: mol_type = other DNA

SEQ ID NO: 27283 - DNA, 36 bp, synthetic construct; identical to SEQ ID NO: 12549
  misc_feature 1..36: note = Synthetic oligonucleotide
  source 1..36: mol_type = other DNA

SEQ ID NO: 27284 - DNA, 37 bp, synthetic construct
  misc_feature 1..37: note = Synthetic oligonucleotide
  source 1..37: mol_type = other DNA
gttatagtcaccggtcatcttccgatactatataaca

SEQ ID NO: 27285 - DNA, 36 bp, synthetic construct; identical to SEQ ID NO: 12555
  misc_feature 1..36: note = Synthetic oligonucleotide
  source 1..36: mol_type = other DNA

SEQ ID NO: 27286 - DNA, 36 bp, synthetic construct; identical to SEQ ID NO: 12557
  misc_feature 1..36: note = Synthetic oligonucleotide
  source 1..36: mol_type = other DNA

SEQ ID NO: 27287 - DNA, 36 bp, synthetic construct
  misc_feature 1..36: note = Synthetic oligonucleotide
  source 1..36: mol_type = other DNA
gttatagttcccctcagattcccggtatgctataat

SEQ ID NO: 27288 - DNA, 36 bp, synthetic construct; identical to SEQ ID NO: 12559
  misc_feature 1..36: note = Synthetic oligonucleotide
  source 1..36: mol_type = other DNA

SEQ ID NO: 27289 - DNA, 37 bp, synthetic construct
  misc_feature 1..37: note = Synthetic oligonucleotide
  source 1..37: mol_type = other DNA
gttatagttcccctttgttctccggtatgctataata

SEQ ID NO: 27290 - DNA, 36 bp, synthetic construct
  misc_feature 1..36: note = Synthetic oligonucleotide
  source 1..36: mol_type = other DNA
gttatagttcccgattattctctgatatgatatata

SEQ ID NO: 27291 - DNA, 36 bp, synthetic construct
  misc_feature 1..36: note = Synthetic oligonucleotide
  source 1..36: mol_type = other DNA
gttatagttcccgggtgattcttggcatggtataat

SEQ ID NO: 27292 - DNA, 36 bp, synthetic construct; identical to SEQ ID NO: 12563
  misc_feature 1..36: note = Synthetic oligonucleotide
  source 1..36: mol_type = other DNA

SEQ ID NO: 27293 - DNA, 36 bp, synthetic construct; identical to SEQ ID NO: 12563
  misc_feature 1..36: note = Synthetic oligonucleotide
  source 1..36: mol_type = other DNA

SEQ ID NO: 27294 - DNA, 36 bp, synthetic construct; identical to SEQ ID NO: 12563
  misc_feature 1..36: note = Synthetic oligonucleotide
  source 1..36: mol_type = other DNA

SEQ ID NO: 27295 - DNA, 36 bp, synthetic construct; identical to SEQ ID NO: 12563
  misc_feature 1..36: note = Synthetic oligonucleotide
  source 1..36: mol_type = other DNA

SEQ ID NO: 27296 - DNA, 36 bp, synthetic construct; identical to SEQ ID NO: 12563
  misc_feature 1..36: note = Synthetic oligonucleotide
  source 1..36: mol_type = other DNA

SEQ ID NO: 27297 - DNA, 36 bp, synthetic construct; identical to SEQ ID NO: 12563
  misc_feature 1..36: note = Synthetic oligonucleotide
  source 1..36: mol_type = other DNA

SEQ ID NO: 27298 - DNA, 36 bp, synthetic construct; identical to SEQ ID NO: 12563
  misc_feature 1..36: note = Synthetic oligonucleotide
  source 1..36: mol_type = other DNA

SEQ ID NO: 27299 - DNA, 36 bp, synthetic construct; identical to SEQ ID NO: 12563
  misc_feature 1..36: note = Synthetic oligonucleotide
  source 1..36: mol_type = other DNA

SEQ ID NO: 27300 - DNA, 36 bp, synthetic construct; identical to SEQ ID NO: 12563
  misc_feature 1..36: note = Synthetic oligonucleotide
  source 1..36: mol_type = other DNA

SEQ ID NO: 27301 - DNA, 36 bp, synthetic construct; identical to SEQ ID NO: 12563
  misc_feature 1..36: note = Synthetic oligonucleotide
  source 1..36: mol_type = other DNA

SEQ ID NO: 27302 - DNA, 36 bp, synthetic construct; identical to SEQ ID NO: 12563
  misc_feature 1..36: note = Synthetic oligonucleotide
  source 1..36: mol_type = other DNA

SEQ ID NO: 27303 - DNA, 36 bp, synthetic construct; identical to SEQ ID NO: 12563
  misc_feature 1..36: note = Synthetic oligonucleotide
  source 1..36: mol_type = other DNA

SEQ ID NO: 27304 - DNA, 36 bp, synthetic construct; identical to SEQ ID NO: 12563
  misc_feature 1..36: note = Synthetic oligonucleotide
  source 1..36: mol_type = other DNA

SEQ ID NO: 27305 - DNA, 36 bp, synthetic construct; identical to SEQ ID NO: 12563
  misc_feature 1..36: note = Synthetic oligonucleotide
  source 1..36: mol_type = other DNA

SEQ ID NO: 27306 - DNA, 36 bp, synthetic construct; identical to SEQ ID NO: 12563
  misc_feature 1..36: note = Synthetic oligonucleotide
  source 1..36: mol_type = other DNA

SEQ ID NO: 27307 - DNA, 36 bp, synthetic construct; identical to SEQ ID NO: 12563
  misc_feature 1..36: note = Synthetic oligonucleotide
  source 1..36: mol_type = other DNA

SEQ ID NO: 27308 - DNA, 36 bp, synthetic construct; identical to SEQ ID NO: 12563
  misc_feature 1..36: note = Synthetic oligonucleotide
  source 1..36: mol_type = other DNA

SEQ ID NO: 27309 - DNA, 36 bp, synthetic construct; identical to SEQ ID NO: 12564
  misc_feature 1..36: note = Synthetic oligonucleotide
  source 1..36: mol_type = other DNA

SEQ ID NO: 27310 - DNA, 36 bp, synthetic construct; identical to SEQ ID NO: 12564
  misc_feature 1..36: note = Synthetic oligonucleotide
  source 1..36: mol_type = other DNA

SEQ ID NO: 27311 - DNA, 36 bp, synthetic construct; identical to SEQ ID NO: 12564
  misc_feature 1..36: note = Synthetic oligonucleotide
  source 1..36: mol_type = other DNA

SEQ ID NO: 27312 - DNA, 36 bp, synthetic construct; identical to SEQ ID NO: 12564
  misc_feature 1..36: note = Synthetic oligonucleotide
  source 1..36: mol_type = other DNA

SEQ ID NO: 27313 - DNA, 36 bp, synthetic construct; identical to SEQ ID NO: 12564
  misc_feature 1..36: note = Synthetic oligonucleotide
  source 1..36: mol_type = other DNA

SEQ ID NO: 27314 - DNA, 36 bp, synthetic construct; identical to SEQ ID NO: 12564
  misc_feature 1..36: note = Synthetic oligonucleotide
  source 1..36: mol_type = other DNA

SEQ ID NO: 27315 - DNA, 36 bp, synthetic construct; identical to SEQ ID NO: 12564
  misc_feature 1..36: note = Synthetic oligonucleotide
  source 1..36: mol_type = other DNA

SEQ ID NO: 27316 - DNA, 36 bp, synthetic construct; identical to SEQ ID NO: 12564
  misc_feature 1..36: note = Synthetic oligonucleotide
  source 1..36: mol_type = other DNA

SEQ ID NO: 27317 - DNA, 36 bp, synthetic construct; identical to SEQ ID NO: 12564
  misc_feature 1..36: note = Synthetic oligonucleotide
  source 1..36: mol_type = other DNA

SEQ ID NO: 27318 - DNA, 36 bp, synthetic construct; identical to SEQ ID NO: 12564
  misc_feature 1..36: note = Synthetic oligonucleotide
  source 1..36: mol_type = other DNA

SEQ ID NO: 27319 - DNA, 36 bp, synthetic construct; identical to SEQ ID NO: 12564
  misc_feature 1..36: note = Synthetic oligonucleotide
  source 1..36: mol_type = other DNA

SEQ ID NO: 27320 - DNA, 36 bp, synthetic construct; identical to SEQ ID NO: 12564
  misc_feature 1..36: note = Synthetic oligonucleotide
  source 1..36: mol_type = other DNA

SEQ ID NO: 27321 - DNA, 36 bp, synthetic construct; identical to SEQ ID NO: 12564
  misc_feature 1..36: note = Synthetic oligonucleotide
  source 1..36: mol_type = other DNA

SEQ ID NO: 27322 - DNA, 36 bp, synthetic construct; identical to SEQ ID NO: 12564
  misc_feature 1..36: note = Synthetic oligonucleotide
  source 1..36: mol_type = other DNA

SEQ ID NO: 27323 - DNA, 36 bp, synthetic construct; identical to SEQ ID NO: 12564
  misc_feature 1..36: note = Synthetic oligonucleotide
  source 1..36: mol_type = other DNA

SEQ ID NO: 27324 - DNA, 36 bp, synthetic construct; identical to SEQ ID NO: 12564
  misc_feature 1..36: note = Synthetic oligonucleotide
  source 1..36: mol_type = other DNA

SEQ ID NO: 27325 - DNA, 36 bp, synthetic construct; identical to SEQ ID NO: 12564
  misc_feature 1..36: note = Synthetic oligonucleotide
  source 1..36: mol_type = other DNA

SEQ ID NO: 27326 - DNA, 38 bp, synthetic construct
  misc_feature 1..38: note = Synthetic oligonucleotide
  source 1..38: mol_type = other DNA
gttatagttccctaacaatttagatattggtataatca

SEQ ID NO: 27327 - DNA, 36 bp, synthetic construct; identical to SEQ ID NO: 12568
  misc_feature 1..36: note = Synthetic oligonucleotide
  source 1..36: mol_type = other DNA

SEQ ID NO: 27328 - DNA, 36 bp, synthetic construct
  misc_feature 1..36: note = Synthetic oligonucleotide
  source 1..36: mol_type = other DNA
gttatagttccctccagttctccggtatgctataat

SEQ ID NO: 27329 - DNA, 36 bp, synthetic construct; identical to SEQ ID NO: 12572
  misc_feature 1..36: note = Synthetic oligonucleotide
  source 1..36: mol_type = other DNA

SEQ ID NO: 27330 - DNA, 36 bp, synthetic construct; identical to SEQ ID NO: 12572
  misc_feature 1..36: note = Synthetic oligonucleotide
  source 1..36: mol_type = other DNA

SEQ ID NO: 27331 - DNA, 36 bp, synthetic construct
  misc_feature 1..36: note = Synthetic oligonucleotide
  source 1..36: mol_type = other DNA
gttatagttccctgacaatttagatagttgtataat

SEQ ID NO: 27332 - DNA, 36 bp, synthetic construct; identical to SEQ ID NO: 12574
  misc_feature 1..36: note = Synthetic oligonucleotide
  source 1..36: mol_type = other DNA

SEQ ID NO: 27333 - DNA, 36 bp, synthetic construct; identical to SEQ ID NO: 12574
  misc_feature 1..36: note = Synthetic oligonucleotide
  source 1..36: mol_type = other DNA

SEQ ID NO: 27334 - DNA, 36 bp, synthetic construct; identical to SEQ ID NO: 12574
  misc_feature 1..36: note = Synthetic oligonucleotide
  source 1..36: mol_type = other DNA

SEQ ID NO: 27335 - DNA, 36 bp, synthetic construct; identical to SEQ ID NO: 12574
  misc_feature 1..36: note = Synthetic oligonucleotide
  source 1..36: mol_type = other DNA

SEQ ID NO: 27336 - DNA, 36 bp, synthetic construct; identical to SEQ ID NO: 12574
  misc_feature 1..36: note = Synthetic oligonucleotide
  source 1..36: mol_type = other DNA

SEQ ID NO: 27337 - DNA, 37 bp, synthetic construct
  misc_feature 1..37: note = Synthetic oligonucleotide
  source 1..37: mol_type = other DNA
gttatagttccctgatagttcttggtatggtataatt

SEQ ID NO: 27338 - DNA, 36 bp, synthetic construct; identical to SEQ ID NO: 12577
  misc_feature 1..36: note = Synthetic oligonucleotide
  source 1..36: mol_type = other DNA

SEQ ID NO: 27339 - DNA, 36 bp, synthetic construct; identical to SEQ ID NO: 12578
  misc_feature 1..36: note = Synthetic oligonucleotide
  source 1..36: mol_type = other DNA

SEQ ID NO: 27340 - DNA, 36 bp, synthetic construct; identical to SEQ ID NO: 12578
  misc_feature 1..36: note = Synthetic oligonucleotide
  source 1..36: mol_type = other DNA

SEQ ID NO: 27341 - DNA, 36 bp, synthetic construct; identical to SEQ ID NO: 12580
  misc_feature 1..36: note = Synthetic oligonucleotide
  source 1..36: mol_type = other DNA

SEQ ID NO: 27342 - DNA, 36 bp, synthetic construct; identical to SEQ ID NO: 12580
  misc_feature 1..36: note = Synthetic oligonucleotide
  source 1..36: mol_type = other DNA

SEQ ID NO: 27343 - DNA, 36 bp, synthetic construct
  misc_feature 1..36: note = Synthetic oligonucleotide
  source 1..36: mol_type = other DNA
gttatagttctcttttaaattttgatatgatataat

SEQ ID NO: 27344 - DNA, 36 bp, synthetic construct; identical to SEQ ID NO: 27343
  misc_feature 1..36: note = Synthetic oligonucleotide
  source 1..36: mol_type = other DNA

SEQ ID NO: 27345 - DNA, 36 bp, synthetic construct
  misc_feature 1..36: note = Synthetic oligonucleotide
  source 1..36: mol_type = other DNA
gttatagttctcttttaagttttgatatgatataat

SEQ ID NO: 27346 - DNA, 36 bp, synthetic construct; identical to SEQ ID NO: 12581
  misc_feature 1..36: note = Synthetic oligonucleotide
  source 1..36: mol_type = other DNA

SEQ ID NO: 27347 - DNA, 36 bp, synthetic construct; identical to SEQ ID NO: 12582
  misc_feature 1..36: note = Synthetic oligonucleotide
  source 1..36: mol_type = other DNA

SEQ ID NO: 27348 - DNA, 36 bp, synthetic construct
  misc_feature 1..36: note = Synthetic oligonucleotide
  source 1..36: mol_type = other DNA
gttatagttgaccgtctaattaatctctgatacgct

SEQ ID NO: 27349 - DNA, 36 bp, synthetic construct; identical to SEQ ID NO: 27348
  misc_feature 1..36: note = Synthetic oligonucleotide
  source 1..36: mol_type = other DNA

SEQ ID NO: 27350 - DNA, 36 bp, synthetic construct; identical to SEQ ID NO: 27348
  misc_feature 1..36: note = Synthetic oligonucleotide
  source 1..36: mol_type = other DNA

SEQ ID NO: 27351 - DNA, 36 bp, synthetic construct
  misc_feature 1..36: note = Synthetic oligonucleotide
  source 1..36: mol_type = other DNA
gttatagttgaccgtctaattaatctctgatacttt

SEQ ID NO: 27352 - DNA, 36 bp, synthetic construct; identical to SEQ ID NO: 27351
  misc_feature 1..36: note = Synthetic oligonucleotide
  source 1..36: mol_type = other DNA

SEQ ID NO: 27353 - DNA, 36 bp, synthetic construct; identical to SEQ ID NO: 27351
  misc_feature 1..36: note = Synthetic oligonucleotide
  source 1..36: mol_type = other DNA

SEQ ID NO: 27354 - DNA, 36 bp, synthetic construct; identical to SEQ ID NO: 27351
  misc_feature 1..36: note = Synthetic oligonucleotide
  source 1..36: mol_type = other DNA

SEQ ID NO: 27355 - DNA, 36 bp, synthetic construct; identical to SEQ ID NO: 27351
  misc_feature 1..36: note = Synthetic oligonucleotide
  source 1..36: mol_type = other DNA

SEQ ID NO: 27356 - DNA, 36 bp, synthetic construct; identical to SEQ ID NO: 27351
  misc_feature 1..36: note = Synthetic oligonucleotide
  source 1..36: mol_type = other DNA

SEQ ID NO: 27357 - DNA, 36 bp, synthetic construct; identical to SEQ ID NO: 27351
  misc_feature 1..36: note = Synthetic oligonucleotide
  source 1..36: mol_type = other DNA

SEQ ID NO: 27358 - DNA, 36 bp, synthetic construct; identical to SEQ ID NO: 27351
  misc_feature 1..36: note = Synthetic oligonucleotide
  source 1..36: mol_type = other DNA

SEQ ID NO: 27359 - DNA, 36 bp, synthetic construct; identical to SEQ ID NO: 27351
  misc_feature 1..36: note = Synthetic oligonucleotide
  source 1..36: mol_type = other DNA

SEQ ID NO: 27360 - DNA, 36 bp, synthetic construct; identical to SEQ ID NO: 27351
  misc_feature 1..36: note = Synthetic oligonucleotide
  source 1..36: mol_type = other DNA

SEQ ID NO: 27361 - DNA, 36 bp, synthetic construct; identical to SEQ ID NO: 27351
  misc_feature 1..36: note = Synthetic oligonucleotide
  source 1..36: mol_type = other DNA

SEQ ID NO: 27362 - DNA, 36 bp, synthetic construct; identical to SEQ ID NO: 27351
  misc_feature 1..36: note = Synthetic oligonucleotide
  source 1..36: mol_type = other DNA

SEQ ID NO: 27363 - DNA, 36 bp, synthetic construct; identical to SEQ ID NO: 27351
  misc_feature 1..36: note = Synthetic oligonucleotide
  source 1..36: mol_type = other DNA

SEQ ID NO: 27364 - DNA, 36 bp, synthetic construct; identical to SEQ ID NO: 27351
  misc_feature 1..36: note = Synthetic oligonucleotide
  source 1..36: mol_type = other DNA

SEQ ID NO: 27365 - DNA, 36 bp, synthetic construct; identical to SEQ ID NO: 27351
  misc_feature 1..36: note = Synthetic oligonucleotide
  source 1..36: mol_type = other DNA

SEQ ID NO: 27366 - DNA, 36 bp, synthetic construct
  misc_feature 1..36: note = Synthetic oligonucleotide
  source 1..36: mol_type = other DNA
gttatagttgaccgtctagttaatctctgatacttt

SEQ ID NO: 27367 - DNA, 36 bp, synthetic construct; identical to SEQ ID NO: 12586
  misc_feature 1..36: note = Synthetic oligonucleotide
  source 1..36: mol_type = other DNA

SEQ ID NO: 27368 - DNA, 36 bp, synthetic construct; identical to SEQ ID NO: 12586
  misc_feature 1..36: note = Synthetic oligonucleotide
  source 1..36: mol_type = other DNA

SEQ ID NO: 27369 - DNA, 36 bp, synthetic construct
  misc_feature 1..36: note = Synthetic oligonucleotide
  source 1..36: mol_type = other DNA
gttatagtttccctcctcacatcggtatgctatact

SEQ ID NO: 27370 - DNA, 36 bp, synthetic construct
  misc_feature 1..36: note = Synthetic oligonucleotide
  source 1..36: mol_type = other DNA
gttatagtttccctccttacctcggtatgctatagt

SEQ ID NO: 27371 - DNA, 36 bp, synthetic construct
  misc_feature 1..36: note = Synthetic oligonucleotide
  source 1..36: mol_type = other DNA
gttatagtttcctaattattcttggtatgatataat

SEQ ID NO: 27372 - DNA, 36 bp, synthetic construct; identical to SEQ ID NO: 12590
  misc_feature 1..36: note = Synthetic oligonucleotide
  source 1..36: mol_type = other DNA

SEQ ID NO: 27373 - DNA, 36 bp, synthetic construct
  misc_feature 1..36: note = Synthetic oligonucleotide
  source 1..36: mol_type = other DNA
gttatattcacttattagattacatgacactaaaac

SEQ ID NO: 27374 - DNA, 36 bp, synthetic construct; identical to SEQ ID NO: 12591
  misc_feature 1..36: note = Synthetic oligonucleotide
  source 1..36: mol_type = other DNA

SEQ ID NO: 27375 - DNA, 37 bp, synthetic construct; identical to SEQ ID NO: 12593
  misc_feature 1..37: note = Synthetic oligonucleotide
  source 1..37: mol_type = other DNA

SEQ ID NO: 27376 - DNA, 37 bp, synthetic construct; identical to SEQ ID NO: 12593
  misc_feature 1..37: note = Synthetic oligonucleotide
  source 1..37: mol_type = other DNA

SEQ ID NO: 27377 - DNA, 36 bp, synthetic construct
  misc_feature 1..36: note = Synthetic oligonucleotide
  source 1..36: mol_type = other DNA
gttatcgcttcctttccaatactgatatgctatact

SEQ ID NO: 27378 - DNA, 36 bp, synthetic construct
  misc_feature 1..36: note = Synthetic oligonucleotide
  source 1..36: mol_type = other DNA
gttatgttctagcaaaaatccatatggtaacaaaac

SEQ ID NO: 27379 - DNA, 22 bp, synthetic construct
  misc_feature 1..22: note = Synthetic oligonucleotide
  source 1..22: mol_type = other DNA
gttattgttatacacgcaaggg

SEQ ID NO: 27380 - DNA, 30 bp, synthetic construct
  misc_feature 1..30: note = Synthetic oligonucleotide
  source 1..30: mol_type = other DNA
gttatttcataccaagaaatattagggagc

SEQ ID NO: 27381 - DNA, 36 bp, synthetic construct; identical to SEQ ID NO: 12600
  misc_feature 1..36: note = Synthetic oligonucleotide
  source 1..36: mol_type = other DNA

SEQ ID NO: 27382 - DNA, 36 bp, synthetic construct; identical to SEQ ID NO: 12600
  misc_feature 1..36: note = Synthetic oligonucleotide
  source 1..36: mol_type = other DNA

SEQ ID NO: 27383 - DNA, 36 bp, synthetic construct; identical to SEQ ID NO: 12600
  misc_feature 1..36: note = Synthetic oligonucleotide
  source 1..36: mol_type = other DNA

SEQ ID NO: 27384 - DNA, 36 bp, synthetic construct
  misc_feature 1..36: note = Synthetic oligonucleotide
  source 1..36: mol_type = other DNA
gttcaaataatacaaataaattcaatcctcaagaac

SEQ ID NO: 27385 - DNA, 36 bp, synthetic construct; identical to SEQ ID NO: 27384
  misc_feature 1..36: note = Synthetic oligonucleotide
  source 1..36: mol_type = other DNA

SEQ ID NO: 27386 - DNA, 36 bp, synthetic construct
  misc_feature 1..36: note = Synthetic oligonucleotide
  source 1..36: mol_type = other DNA
gttcaaataataccaattatcgcattccttaagaac

SEQ ID NO: 27387 - DNA, 36 bp, synthetic construct
  misc_feature 1..36: note = Synthetic oligonucleotide
  source 1..36: mol_type = other DNA
gttcaaataatacgaaaaaacacaatccttaagaac

SEQ ID NO: 27388 - DNA, 36 bp, synthetic construct
  misc_feature 1..36: note = Synthetic oligonucleotide
  source 1..36: mol_type = other DNA
gttcaacatcaatcaaggattaccttactctaaaac

SEQ ID NO: 27389 - DNA, 36 bp, synthetic construct
  misc_feature 1..36: note = Synthetic oligonucleotide
  source 1..36: mol_type = other DNA
gttcaagaccttttctgaattacaagactctcaaac

SEQ ID NO: 27390 - DNA, 28 bp, synthetic construct
  misc_feature 1..28: note = Synthetic oligonucleotide
  source 1..28: mol_type = other DNA
gttcactgccgcataggcagctcagaaa

SEQ ID NO: 27391 - DNA, 28 bp, synthetic construct
  misc_feature 1..28: note = Synthetic oligonucleotide
  source 1..28: mol_type = other DNA
gttcactgccgcataggcagctcagaaa

SEQ ID NO: 27392 - DNA, 36 bp, synthetic construct
  misc_feature 1..36: note = Synthetic oligonucleotide
  source 1..36: mol_type = other DNA
gttcagttatacgattattttacacgactctcaaac

SEQ ID NO: 27393 - DNA, 36 bp, synthetic construct; identical to SEQ ID NO: 12607
  misc_feature 1..36: note = Synthetic oligonucleotide
  source 1..36: mol_type = other DNA

SEQ ID NO: 27394 - DNA, 36 bp, synthetic construct; identical to SEQ ID NO: 12607
  misc_feature 1..36: note = Synthetic oligonucleotide
  source 1..36: mol_type = other DNA

SEQ ID NO: 27395 - DNA, 36 bp, synthetic construct
  misc_feature 1..36: note = Synthetic oligonucleotide
  source 1..36: mol_type = other DNA
gttcatacatagcaaaattctagagggtggcaaaac

SEQ ID NO: 27396 - DNA, 37 bp, synthetic construct
  misc_feature 1..37: note = Synthetic oligonucleotide
  source 1..37: mol_type = other DNA
gttccaaattgtagcgcatcatttctctcagtggaag

SEQ ID NO: 27397 - DNA, 36 bp, synthetic construct; identical to SEQ ID NO: 12609
  misc_feature 1..36: note = Synthetic oligonucleotide
  source 1..36: mol_type = other DNA

SEQ ID NO: 27398 - DNA, 36 bp, synthetic construct
  misc_feature 1..36: note = Synthetic oligonucleotide
  source 1..36: mol_type = other DNA
gttccagctagtgcgcaaatcccaatctgctaaact

SEQ ID NO: 27399 - DNA, 36 bp, synthetic construct
  misc_feature 1..36: note = Synthetic oligonucleotide
  source 1..36: mol_type = other DNA
gttccatggccccgtcccacacggccatggtagagt

SEQ ID NO: 27400 - DNA, 36 bp, synthetic construct
  misc_feature 1..36: note = Synthetic oligonucleotide
  source 1..36: mol_type = other DNA
gttccgacaccccaccatcggaatgcctgatacact

SEQ ID NO: 27401 - DNA, 36 bp, synthetic construct; identical to SEQ ID NO: 27400
  misc_feature 1..36: note = Synthetic oligonucleotide
  source 1..36: mol_type = other DNA

SEQ ID NO: 27402 - DNA, 36 bp, synthetic construct; identical to SEQ ID NO: 12617
  misc_feature 1..36: note = Synthetic oligonucleotide
  source 1..36: mol_type = other DNA

SEQ ID NO: 27403 - DNA, 36 bp, synthetic construct; identical to SEQ ID NO: 12617
  misc_feature 1..36: note = Synthetic oligonucleotide
  source 1..36: mol_type = other DNA

SEQ ID NO: 27404 - DNA, 36 bp, synthetic construct; identical to SEQ ID NO: 12623
  misc_feature 1..36: note = Synthetic oligonucleotide
  source 1..36: mol_type = other DNA

SEQ ID NO: 27405 - DNA, 36 bp, synthetic construct; identical to SEQ ID NO: 12623
  misc_feature 1..36: note = Synthetic oligonucleotide
  source 1..36: mol_type = other DNA

SEQ ID NO: 27406 - DNA, 36 bp, synthetic construct; identical to SEQ ID NO: 12623
  misc_feature 1..36: note = Synthetic oligonucleotide
  source 1..36: mol_type = other DNA

SEQ ID NO: 27407 - DNA, 36 bp, synthetic construct; identical to SEQ ID NO: 12623
  misc_feature 1..36: note = Synthetic oligonucleotide
  source 1..36: mol_type = other DNA

SEQ ID NO: 27408 - DNA, 37 bp, synthetic construct
  misc_feature 1..37: note = Synthetic oligonucleotide
  source 1..37: mol_type = other DNA
gttccgataccccaccatcggaatgcctgatacgctc

SEQ ID NO: 27409 - DNA, 36 bp, synthetic construct
  misc_feature 1..36: note = Synthetic oligonucleotide
  source 1..36: mol_type = other DNA
gttccgataccccaccatcggaatgcctgatatact

SEQ ID NO: 27410 - DNA, 36 bp, synthetic construct; identical to SEQ ID NO: 27409
  misc_feature 1..36: note = Synthetic oligonucleotide
  source 1..36: mol_type = other DNA

SEQ ID NO: 27411 - DNA, 36 bp, synthetic construct; identical to SEQ ID NO: 27409
  misc_feature 1..36: note = Synthetic oligonucleotide
  source 1..36: mol_type = other DNA

SEQ ID NO: 27412 - DNA, 36 bp, synthetic construct; identical to SEQ ID NO: 27409
  misc_feature 1..36: note = Synthetic oligonucleotide
  source 1..36: mol_type = other DNA

SEQ ID NO: 27413 - DNA, 36 bp, synthetic construct; identical to SEQ ID NO: 27409
  misc_feature 1..36: note = Synthetic oligonucleotide
  source 1..36: mol_type = other DNA

SEQ ID NO: 27414 - DNA, 36 bp, synthetic construct; identical to SEQ ID NO: 27409
  misc_feature 1..36: note = Synthetic oligonucleotide
  source 1..36: mol_type = other DNA

SEQ ID NO: 27415 - DNA, 36 bp, synthetic construct; identical to SEQ ID NO: 12625
  misc_feature 1..36: note = Synthetic oligonucleotide
  source 1..36: mol_type = other DNA

SEQ ID NO: 27416 - DNA, 36 bp, synthetic construct
  misc_feature 1..36: note = Synthetic oligonucleotide
  source 1..36: mol_type = other DNA
gttccgataccccaccatcggactttctgctacaat

SEQ ID NO: 27417 - DNA, 36 bp, synthetic construct
  misc_feature 1..36: note = Synthetic oligonucleotide
  source 1..36: mol_type = other DNA
gttccgataccccaccgtcggaatacctgatacaat

SEQ ID NO: 27418 - DNA, 36 bp, synthetic construct
  misc_feature 1..36: note = Synthetic oligonucleotide
  source 1..36: mol_type = other DNA
gttccgatacctcaccagcggaacatctgatacaat

SEQ ID NO: 27419 - DNA, 36 bp, synthetic construct
  misc_feature 1..36: note = Synthetic oligonucleotide
  source 1..36: mol_type = other DNA
gttccgattggctcacattttctaatttgttataat

SEQ ID NO: 27420 - DNA, 36 bp, synthetic construct; identical to SEQ ID NO: 27419
  misc_feature 1..36: note = Synthetic oligonucleotide
  source 1..36: mol_type = other DNA

SEQ ID NO: 27421 - DNA, 36 bp, synthetic construct; identical to SEQ ID NO: 12630
  misc_feature 1..36: note = Synthetic oligonucleotide
  source 1..36: mol_type = other DNA

SEQ ID NO: 27422 - DNA, 36 bp, synthetic construct
  misc_feature 1..36: note = Synthetic oligonucleotide
  source 1..36: mol_type = other DNA
gttccggatagagcgcatttcccagtgatctaaaat

SEQ ID NO: 27423 - DNA, 36 bp, synthetic construct; identical to SEQ ID NO: 27422
  misc_feature 1..36: note = Synthetic oligonucleotide
  source 1..36: mol_type = other DNA

SEQ ID NO: 27424 - DNA, 36 bp, synthetic construct
  misc_feature 1..36: note = Synthetic oligonucleotide
  source 1..36: mol_type = other DNA
gttccggatagcacacaactcccagtgatctagaat

SEQ ID NO: 27425 - DNA, 38 bp, synthetic construct
  misc_feature 1..38: note = Synthetic oligonucleotide
  source 1..38: mol_type = other DNA
gttccggcacctcactttagcaagtacctgtatactcc

SEQ ID NO: 27426 - DNA, 36 bp, synthetic construct
  misc_feature 1..36: note = Synthetic oligonucleotide
  source 1..36: mol_type = other DNA
gttccggccaaagcgcgtatcccaatcggctagact

SEQ ID NO: 27427 - DNA, 36 bp, synthetic construct; identical to SEQ ID NO: 12633
  misc_feature 1..36: note = Synthetic oligonucleotide
  source 1..36: mol_type = other DNA

SEQ ID NO: 27428 - DNA, 36 bp, synthetic construct; identical to SEQ ID NO: 12633
  misc_feature 1..36: note = Synthetic oligonucleotide
  source 1..36: mol_type = other DNA

SEQ ID NO: 27429 - DNA, 36 bp, synthetic construct; identical to SEQ ID NO: 12636
  misc_feature 1..36: note = Synthetic oligonucleotide
  source 1..36: mol_type = other DNA

SEQ ID NO: 27430 - DNA, 36 bp, synthetic construct
  misc_feature 1..36: note = Synthetic oligonucleotide
  source 1..36: mol_type = other DNA
gttccggccagagcgcatatcccaatcgaatagact

SEQ ID NO: 27431 - DNA, 36 bp, synthetic construct
  misc_feature 1..36: note = Synthetic oligonucleotide
  source 1..36: mol_type = other DNA
gttccggccagagcgcatatcccaatcgtctagact

SEQ ID NO: 27432 - DNA, 36 bp, synthetic construct; identical to SEQ ID NO: 27431
  misc_feature 1..36: note = Synthetic oligonucleotide
  source 1..36: mol_type = other DNA

SEQ ID NO: 27433 - DNA, 36 bp, synthetic construct
  misc_feature 1..36: note = Synthetic oligonucleotide
  source 1..36: mol_type = other DNA
gttccggccagagcgcatatcccagtcagctagaat

SEQ ID NO: 27434 - DNA, 36 bp, synthetic construct
  misc_feature 1..36: note = Synthetic oligonucleotide
  source 1..36: mol_type = other DNA
gttccggccagagcgcatttcccaatcagctagact

SEQ ID NO: 27435 - DNA, 36 bp, synthetic construct; identical to SEQ ID NO: 12638
  misc_feature 1..36: note = Synthetic oligonucleotide
  source 1..36: mol_type = other DNA

SEQ ID NO: 27436 - DNA, 36 bp, synthetic construct; identical to SEQ ID NO: 12638
  misc_feature 1..36: note = Synthetic oligonucleotide
  source 1..36: mol_type = other DNA

SEQ ID NO: 27437 - DNA, 36 bp, synthetic construct
  misc_feature 1..36: note = Synthetic oligonucleotide
  source 1..36: mol_type = other DNA
gttccggccagagcgcatttcccagtgatctagact

SEQ ID NO: 27438 - DNA, 37 bp, synthetic construct; identical to SEQ ID NO: 12641
  misc_feature 1..37: note = Synthetic oligonucleotide
  source 1..37: mol_type = other DNA

SEQ ID NO: 27439 - DNA, 36 bp, synthetic construct
  misc_feature 1..36: note = Synthetic oligonucleotide
  source 1..36: mol_type = other DNA
gttccggccagagctcatatcccaatcgcctagact

SEQ ID NO: 27440 - DNA, 36 bp, synthetic construct; identical to SEQ ID NO: 27439
  misc_feature 1..36: note = Synthetic oligonucleotide
  source 1..36: mol_type = other DNA

SEQ ID NO: 27441 - DNA, 37 bp, synthetic construct
  misc_feature 1..37: note = Synthetic oligonucleotide
  source 1..37: mol_type = other DNA
gttccggccagagctcatatcccgagcatctagactc

SEQ ID NO: 27442 - DNA, 36 bp, synthetic construct; identical to SEQ ID NO: 12642
  misc_feature 1..36: note = Synthetic oligonucleotide
  source 1..36: mol_type = other DNA

SEQ ID NO: 27443 - DNA, 36 bp, synthetic construct; identical to SEQ ID NO: 12642
  misc_feature 1..36: note = Synthetic oligonucleotide
  source 1..36: mol_type = other DNA

SEQ ID NO: 27444 - DNA, 36 bp, synthetic construct
  misc_feature 1..36: note = Synthetic oligonucleotide
  source 1..36: mol_type = other DNA
gttccggccagtgcacatatcccaatctggtaaact

SEQ ID NO: 27445 - DNA, 36 bp, synthetic construct; identical to SEQ ID NO: 27444
  misc_feature 1..36: note = Synthetic oligonucleotide
  source 1..36: mol_type = other DNA

SEQ ID NO: 27446 - DNA, 36 bp, synthetic construct; identical to SEQ ID NO: 27444
  misc_feature 1..36: note = Synthetic oligonucleotide
  source 1..36: mol_type = other DNA

SEQ ID NO: 27447 - DNA, 36 bp, synthetic construct; identical to SEQ ID NO: 12647
  misc_feature 1..36: note = Synthetic oligonucleotide
  source 1..36: mol_type = other DNA

SEQ ID NO: 27448 - DNA, 36 bp, synthetic construct; identical to SEQ ID NO: 12648
  misc_feature 1..36: note = Synthetic oligonucleotide
  source 1..36: mol_type = other DNA

SEQ ID NO: 27449 - DNA, 36 bp, synthetic construct
  misc_feature 1..36: note = Synthetic oligonucleotide
  source 1..36: mol_type = other DNA
gttccggccagtgcgcatatctcaatgatttaaact

SEQ ID NO: 27450 - DNA, 36 bp, synthetic construct
  misc_feature 1..36: note = Synthetic oligonucleotide
  source 1..36: mol_type = other DNA
gttccggccagtgctcatatcccgagcaactagact

SEQ ID NO: 27451 - DNA, 36 bp, synthetic construct
  misc_feature 1..36: note = Synthetic oligonucleotide
  source 1..36: mol_type = other DNA
gttccggcccgagcgcaaatcccaatctgctacact

SEQ ID NO: 27452 - DNA, 36 bp, synthetic construct
  misc_feature 1..36: note = Synthetic oligonucleotide
  source 1..36: mol_type = other DNA
gttccggctagaccacagactcgggggcgctaggat

SEQ ID NO: 27453 - DNA, 36 bp, synthetic construct
  misc_feature 1..36: note = Synthetic oligonucleotide
  source 1..36: mol_type = other DNA
gttccggctagaccacagattccgaggccccatgct

SEQ ID NO: 27454 - DNA, 36 bp, synthetic construct; identical to SEQ ID NO: 12654
  misc_feature 1..36: note = Synthetic oligonucleotide
  source 1..36: mol_type = other DNA

SEQ ID NO: 27455 - DNA, 36 bp, synthetic construct
  misc_feature 1..36: note = Synthetic oligonucleotide
  source 1..36: mol_type = other DNA
gttccggctagagcgcaattcctgatctgctaacct

SEQ ID NO: 27456 - DNA, 37 bp, synthetic construct
  misc_feature 1..37: note = Synthetic oligonucleotide
  source 1..37: mol_type = other DNA
gttccggctagagcgcaattcctgatctgctacgctc

SEQ ID NO: 27457 - DNA, 37 bp, synthetic construct
  misc_feature 1..37: note = Synthetic oligonucleotide
  source 1..37: mol_type = other DNA
gttccggctagagcgcatttcctgatctgctacgctc

SEQ ID NO: 27458 - DNA, 38 bp, synthetic construct
  misc_feature 1..38: note = Synthetic oligonucleotide
  source 1..38: mol_type = other DNA
gttccggctagagcgcatttcctgatctgctacgctgg

SEQ ID NO: 27459 - DNA, 37 bp, synthetic construct
  misc_feature 1..37: note = Synthetic oligonucleotide
  source 1..37: mol_type = other DNA
gttccggctagagcgcatttcctgatctgttacgctc

SEQ ID NO: 27460 - DNA, 36 bp, synthetic construct
  misc_feature 1..36: note = Synthetic oligonucleotide
  source 1..36: mol_type = other DNA
gttccggctcgagcgcgattccctatcagctagact

SEQ ID NO: 27461 - DNA, 37 bp, synthetic construct
  misc_feature 1..37: note = Synthetic oligonucleotide
  source 1..37: mol_type = other DNA
gttccggcttgagcgcgatctccgattcgatatgctc

SEQ ID NO: 27462 - DNA, 37 bp, synthetic construct; identical to SEQ ID NO: 27461
  misc_feature 1..37: note = Synthetic oligonucleotide
  source 1..37: mol_type = other DNA

SEQ ID NO: 27463 - DNA, 37 bp, synthetic construct; identical to SEQ ID NO: 12664
  misc_feature 1..37: note = Synthetic oligonucleotide
  source 1..37: mol_type = other DNA

SEQ ID NO: 27464 - DNA, 36 bp, synthetic construct; identical to SEQ ID NO: 12665
  misc_feature 1..36: note = Synthetic oligonucleotide
  source 1..36: mol_type = other DNA

SEQ ID NO: 27465 - DNA, 36 bp, synthetic construct; identical to SEQ ID NO: 12665
  misc_feature 1..36: note = Synthetic oligonucleotide
  source 1..36: mol_type = other DNA

SEQ ID NO: 27466 - DNA, 36 bp, synthetic construct
  misc_feature 1..36: note = Synthetic oligonucleotide
  source 1..36: mol_type = other DNA
gttccggtcagagcacaaatcccaatctgctaaact

SEQ ID NO: 27467 - DNA, 36 bp, synthetic construct
  misc_feature 1..36: note = Synthetic oligonucleotide
  source 1..36: mol_type = other DNA
gttccggtcagagcacaaatcccaatctgctagact

SEQ ID NO: 27468 - DNA, 36 bp, synthetic construct
  misc_feature 1..36: note = Synthetic oligonucleotide
  source 1..36: mol_type = other DNA
gttccggtcagagcgcaaatcccaatctgctacact

SEQ ID NO: 27469 - DNA, 36 bp, synthetic construct
  misc_feature 1..36: note = Synthetic oligonucleotide
  source 1..36: mol_type = other DNA
gttccggtcagagcgcatatcccaatcaactagact

SEQ ID NO: 27470 - DNA, 36 bp, synthetic construct; identical to SEQ ID NO: 12669
  misc_feature 1..36: note = Synthetic oligonucleotide
  source 1..36: mol_type = other DNA

SEQ ID NO: 27471 - DNA, 36 bp, synthetic construct
  misc_feature 1..36: note = Synthetic oligonucleotide
  source 1..36: mol_type = other DNA
gttccggtcagagcgcatatcccatactgctatact

SEQ ID NO: 27472 - DNA, 36 bp, synthetic construct; identical to SEQ ID NO: 12670
  misc_feature 1..36: note = Synthetic oligonucleotide
  source 1..36: mol_type = other DNA

SEQ ID NO: 27473 - DNA, 36 bp, synthetic construct
  misc_feature 1..36: note = Synthetic oligonucleotide
  source 1..36: mol_type = other DNA
gttccggtcagagcgcatttcccaatcgaatagact

SEQ ID NO: 27474 - DNA, 36 bp, synthetic construct; identical to SEQ ID NO: 12672
  misc_feature 1..36: note = Synthetic oligonucleotide
  source 1..36: mol_type = other DNA

SEQ ID NO: 27475 - DNA, 36 bp, synthetic construct; identical to SEQ ID NO: 12673
  misc_feature 1..36: note = Synthetic oligonucleotide
  source 1..36: mol_type = other DNA

SEQ ID NO: 27476 - DNA, 36 bp, synthetic construct; identical to SEQ ID NO: 12673
  misc_feature 1..36: note = Synthetic oligonucleotide
  source 1..36: mol_type = other DNA

SEQ ID NO: 27477 - DNA, 36 bp, synthetic construct; identical to SEQ ID NO: 12673
  misc_feature 1..36: note = Synthetic oligonucleotide
  source 1..36: mol_type = other DNA

SEQ ID NO: 27478 - DNA, 36 bp, synthetic construct
  misc_feature 1..36: note = Synthetic oligonucleotide
  source 1..36: mol_type = other DNA
gttccggtcagagcgcatttcctaatcgactagact

SEQ ID NO: 27479 - DNA, 36 bp, synthetic construct; identical to SEQ ID NO: 12678
  misc_feature 1..36: note = Synthetic oligonucleotide
  source 1..36: mol_type = other DNA

SEQ ID NO: 27480 - DNA, 36 bp, synthetic construct; identical to SEQ ID NO: 12681
  misc_feature 1..36: note = Synthetic oligonucleotide
  source 1..36: mol_type = other DNA

SEQ ID NO: 27481 - DNA, 36 bp, synthetic construct
  misc_feature 1..36: note = Synthetic oligonucleotide
  source 1..36: mol_type = other DNA
gttccggtcagtgcgcatatctcaatcaagtaaact

SEQ ID NO: 27482 - DNA, 36 bp, synthetic construct; identical to SEQ ID NO: 27481
  misc_feature 1..36: note = Synthetic oligonucleotide
  source 1..36: mol_type = other DNA

SEQ ID NO: 27483 - DNA, 36 bp, synthetic construct
  misc_feature 1..36: note = Synthetic oligonucleotide
  source 1..36: mol_type = other DNA
gttccggtggttcctcaaaacgcactgtgctacgat

SEQ ID NO: 27484 - DNA, 36 bp, synthetic construct
  misc_feature 1..36: note = Synthetic oligonucleotide
  source 1..36: mol_type = other DNA
gttccggttagtgctcatatcccaatgaggtatact

SEQ ID NO: 27485 - DNA, 36 bp, synthetic construct
  misc_feature 1..36: note = Synthetic oligonucleotide
  source 1..36: mol_type = other DNA
gttccggttagtgctcatatcccgatgatgtacaat

SEQ ID NO: 27486 - DNA, 36 bp, synthetic construct
  misc_feature 1..36: note = Synthetic oligonucleotide
  source 1..36: mol_type = other DNA
gttccgtccagtgcgcatttcctagtcagataaaat

SEQ ID NO: 27487 - DNA, 36 bp, synthetic construct; identical to SEQ ID NO: 12689
  misc_feature 1..36: note = Synthetic oligonucleotide
  source 1..36: mol_type = other DNA

SEQ ID NO: 27488 - DNA, 36 bp, synthetic construct
  misc_feature 1..36: note = Synthetic oligonucleotide
  source 1..36: mol_type = other DNA
gttctaaacctcattgatctaacaatcatctaaaac

SEQ ID NO: 27489 - DNA, 36 bp, synthetic construct
  misc_feature 1..36: note = Synthetic oligonucleotide
  source 1..36: mol_type = other DNA
gttctaaaccttattgatctaacaaccttctaaaac

SEQ ID NO: 27490 - DNA, 36 bp, synthetic construct; identical to SEQ ID NO: 12690
  misc_feature 1..36: note = Synthetic oligonucleotide
  source 1..36: mol_type = other DNA

SEQ ID NO: 27491 - DNA, 36 bp, synthetic construct
  misc_feature 1..36: note = Synthetic oligonucleotide
  source 1..36: mol_type = other DNA
gttctagacatcattgatctgaagtacacctaaaac

SEQ ID NO: 27492 - DNA, 25 bp, synthetic construct
  misc_feature 1..25: note = Synthetic oligonucleotide
  source 1..25: mol_type = other DNA
gttctagcagaacgagaaagggctg

SEQ ID NO: 27493 - DNA, 36 bp, synthetic construct; identical to SEQ ID NO: 12693
  misc_feature 1..36: note = Synthetic oligonucleotide
  source 1..36: mol_type = other DNA

SEQ ID NO: 27494 - DNA, 36 bp, synthetic construct; identical to SEQ ID NO: 12693
  misc_feature 1..36: note = Synthetic oligonucleotide
  source 1..36: mol_type = other DNA

SEQ ID NO: 27495 - DNA, 36 bp, synthetic construct
  misc_feature 1..36: note = Synthetic oligonucleotide
  source 1..36: mol_type = other DNA
gttctagcagaagaagcctcgcggccaaacccagac

SEQ ID NO: 27496 - DNA, 36 bp, synthetic construct
  misc_feature 1..36: note = Synthetic oligonucleotide
  source 1..36: mol_type = other DNA
gttctagcagacgacgcggcgcggtcccaccgcaac

SEQ ID NO: 27497 - DNA, 36 bp, synthetic construct
  misc_feature 1..36: note = Synthetic oligonucleotide
  source 1..36: mol_type = other DNA
gttctagcagagatcgccgcgcggtccgaccggaac

SEQ ID NO: 27498 - DNA, 36 bp, synthetic construct; identical to SEQ ID NO: 12698
  misc_feature 1..36: note = Synthetic oligonucleotide
  source 1..36: mol_type = other DNA

SEQ ID NO: 27499 - DNA, 36 bp, synthetic construct; identical to SEQ ID NO: 12699
  misc_feature 1..36: note = Synthetic oligonucleotide
  source 1..36: mol_type = other DNA

SEQ ID NO: 27500 - DNA, 36 bp, synthetic construct; identical to SEQ ID NO: 12699
  misc_feature 1..36: note = Synthetic oligonucleotide
  source 1..36: mol_type = other DNA

SEQ ID NO: 27501 - DNA, 36 bp, synthetic construct
  misc_feature 1..36: note = Synthetic oligonucleotide
  source 1..36: mol_type = other DNA
gttctagtttcccttccaatccaagcctgctatact

SEQ ID NO: 27502 - DNA, 36 bp, synthetic construct
  misc_feature 1..36: note = Synthetic oligonucleotide
  source 1..36: mol_type = other DNA
gttctatcttattggaattctacatcaaaccacaac

SEQ ID NO: 27503 - DNA, 36 bp, synthetic construct
  misc_feature 1..36: note = Synthetic oligonucleotide
  source 1..36: mol_type = other DNA
gttctcgtcccctcttatacggggtgggttccgatt

SEQ ID NO: 27504 - DNA, 36 bp, synthetic construct
  misc_feature 1..36: note = Synthetic oligonucleotide
  source 1..36: mol_type = other DNA
gttctgaagttgactccaacgagtcattatggtata

SEQ ID NO: 27505 - DNA, 36 bp, synthetic construct
  misc_feature 1..36: note = Synthetic oligonucleotide
  source 1..36: mol_type = other DNA
gttctgacttcaccccccggcaaagtcaggtagaat

SEQ ID NO: 27506 - DNA, 36 bp, synthetic construct
  misc_feature 1..36: note = Synthetic oligonucleotide
  source 1..36: mol_type = other DNA
gttctgacttcaccccccggcgaagtctgttagaat

SEQ ID NO: 27507 - DNA, 36 bp, synthetic construct; identical to SEQ ID NO: 27506
  misc_feature 1..36: note = Synthetic oligonucleotide
  source 1..36: mol_type = other DNA

SEQ ID NO: 27508 - DNA, 36 bp, synthetic construct
  misc_feature 1..36: note = Synthetic oligonucleotide
  source 1..36: mol_type = other DNA
gttctgacttcaccccccggcggagtccgttagaat

SEQ ID NO: 27509 - DNA, 36 bp, synthetic construct
  misc_feature 1..36: note = Synthetic oligonucleotide
  source 1..36: mol_type = other DNA
gttctgacttcaccccccggcggagtcggctacagt

SEQ ID NO: 27510 - DNA, 36 bp, synthetic construct
  misc_feature 1..36: note = Synthetic oligonucleotide
  source 1..36: mol_type = other DNA
gttctgctaccatcgaaatttttgctaggctacaac

SEQ ID NO: 27511 - DNA, 36 bp, synthetic construct; identical to SEQ ID NO: 27510
  misc_feature 1..36: note = Synthetic oligonucleotide
  source 1..36: mol_type = other DNA

SEQ ID NO: 27512 - DNA, 36 bp, synthetic construct; identical to SEQ ID NO: 27510
  misc_feature 1..36: note = Synthetic oligonucleotide
  source 1..36: mol_type = other DNA

SEQ ID NO: 27513 - DNA, 36 bp, synthetic construct; identical to SEQ ID NO: 27510
  misc_feature 1..36: note = Synthetic oligonucleotide
  source 1..36: mol_type = other DNA

SEQ ID NO: 27514 - DNA, 36 bp, synthetic construct; identical to SEQ ID NO: 27510
  misc_feature 1..36: note = Synthetic oligonucleotide
  source 1..36: mol_type = other DNA

SEQ ID NO: 27515 - DNA, 36 bp, synthetic construct
  misc_feature 1..36: note = Synthetic oligonucleotide
  source 1..36: mol_type = other DNA
gttctggcgaaacctcaattcctaagtttctagatt

SEQ ID NO: 27516 - DNA, 36 bp, synthetic construct; identical to SEQ ID NO: 27515
  misc_feature 1..36: note = Synthetic oligonucleotide
  source 1..36: mol_type = other DNA

SEQ ID NO: 27517 - DNA, 36 bp, synthetic construct
  misc_feature 1..36: note = Synthetic oligonucleotide
  source 1..36: mol_type = other DNA
gttctggcgaaacctcatttcctaagtttctatatt

SEQ ID NO: 27518 - DNA, 36 bp, synthetic construct
  misc_feature 1..36: note = Synthetic oligonucleotide
  source 1..36: mol_type = other DNA
gttctggcttaagctcgtttcctaacgatataaaat

SEQ ID NO: 27519 - DNA, 36 bp, synthetic construct; identical to SEQ ID NO: 27518
  misc_feature 1..36: note = Synthetic oligonucleotide
  source 1..36: mol_type = other DNA

SEQ ID NO: 27520 - DNA, 36 bp, synthetic construct; identical to SEQ ID NO: 27518
  misc_feature 1..36: note = Synthetic oligonucleotide
  source 1..36: mol_type = other DNA

SEQ ID NO: 27521 - DNA, 36 bp, synthetic construct
  misc_feature 1..36: note = Synthetic oligonucleotide
  source 1..36: mol_type = other DNA
gttctgtattgaccacaatatttaatatgttataat

SEQ ID NO: 27522 - DNA, 36 bp, synthetic construct
  misc_feature 1..36: note = Synthetic oligonucleotide
  source 1..36: mol_type = other DNA
gttcttaaggattgtaatttgttgtattttttgaac

SEQ ID NO: 27523 - DNA, 36 bp, synthetic construct
  misc_feature 1..36: note = Synthetic oligonucleotide
  source 1..36: mol_type = other DNA
gttcttaaggattgtattttgttgtattttttgaac

SEQ ID NO: 27524 - DNA, 36 bp, synthetic construct; identical to SEQ ID NO: 12709
  misc_feature 1..36: note = Synthetic oligonucleotide
  source 1..36: mol_type = other DNA

SEQ ID NO: 27525 - DNA, 36 bp, synthetic construct
  misc_feature 1..36: note = Synthetic oligonucleotide
  source 1..36: mol_type = other DNA
gttcttgagcatcccatttattggtattatttgatc

SEQ ID NO: 27526 - DNA, 36 bp, synthetic construct; identical to SEQ ID NO: 12711
  misc_feature 1..36: note = Synthetic oligonucleotide
  source 1..36: mol_type = other DNA

SEQ ID NO: 27527 - DNA, 36 bp, synthetic construct; identical to SEQ ID NO: 12711
  misc_feature 1..36: note = Synthetic oligonucleotide
  source 1..36: mol_type = other DNA

SEQ ID NO: 27528 - DNA, 36 bp, synthetic construct; identical to SEQ ID NO: 12711
  misc_feature 1..36: note = Synthetic oligonucleotide
  source 1..36: mol_type = other DNA

SEQ ID NO: 27529 - DNA, 36 bp, synthetic construct; identical to SEQ ID NO: 12711
  misc_feature 1..36: note = Synthetic oligonucleotide
  source 1..36: mol_type = other DNA

SEQ ID NO: 27530 - DNA, 36 bp, synthetic construct; identical to SEQ ID NO: 12711
  misc_feature 1..36: note = Synthetic oligonucleotide
  source 1..36: mol_type = other DNA

SEQ ID NO: 27531 - DNA, 36 bp, synthetic construct; identical to SEQ ID NO: 12711
  misc_feature 1..36: note = Synthetic oligonucleotide
  source 1..36: mol_type = other DNA

SEQ ID NO: 27532 - DNA, 36 bp, synthetic construct; identical to SEQ ID NO: 12711
  misc_feature 1..36: note = Synthetic oligonucleotide
  source 1..36: mol_type = other DNA

SEQ ID NO: 27533 - DNA, 36 bp, synthetic construct; identical to SEQ ID NO: 12711
  misc_feature 1..36: note = Synthetic oligonucleotide
  source 1..36: mol_type = other DNA

SEQ ID NO: 27534 - DNA, 36 bp, synthetic construct; identical to SEQ ID NO: 12711
  misc_feature 1..36: note = Synthetic oligonucleotide
  source 1..36: mol_type = other DNA

SEQ ID NO: 27535 - DNA, 36 bp, synthetic construct; identical to SEQ ID NO: 12711
  misc_feature 1..36: note = Synthetic oligonucleotide
  source 1..36: mol_type = other DNA

SEQ ID NO: 27536 - DNA, 36 bp, synthetic construct
  misc_feature 1..36: note = Synthetic oligonucleotide
  source 1..36: mol_type = other DNA
gttcttgaggattgaatttatttgtattatttgaac

SEQ ID NO: 27537 - DNA, 36 bp, synthetic construct
  misc_feature 1..36: note = Synthetic oligonucleotide
  source 1..36: mol_type = other DNA
gttcttgaggattgtattaattggtaatatttgaac

SEQ ID NO: 27538 - DNA, 36 bp, synthetic construct
  misc_feature 1..36: note = Synthetic oligonucleotide
  source 1..36: mol_type = other DNA
gttgaaaattagcttctaccattcttgatataattg

SEQ ID NO: 27539 - DNA, 36 bp, synthetic construct
  misc_feature 1..36: note = Synthetic oligonucleotide
  source 1..36: mol_type = other DNA
gttgaaaattagcttctacccttcttgatataattg

SEQ ID NO: 27540 - DNA, 36 bp, synthetic construct
  misc_feature 1..36: note = Synthetic oligonucleotide
  source 1..36: mol_type = other DNA
gttgaaagtcttgctcattttacatcaaaccacaac

SEQ ID NO: 27541 - DNA, 36 bp, synthetic construct; identical to SEQ ID NO: 27540
  misc_feature 1..36: note = Synthetic oligonucleotide
  source 1..36: mol_type = other DNA

SEQ ID NO: 27542 - DNA, 36 bp, synthetic construct
  misc_feature 1..36: note = Synthetic oligonucleotide
  source 1..36: mol_type = other DNA
gttgaaagtcttgcttgttttacatcaaaccacaac

SEQ ID NO: 27543 - DNA, 36 bp, synthetic construct
  misc_feature 1..36: note = Synthetic oligonucleotide
  source 1..36: mol_type = other DNA
gttgaacagataccttaaataacattactctcaaac

SEQ ID NO: 27544 - DNA, 36 bp, synthetic construct
  misc_feature 1..36: note = Synthetic oligonucleotide
  source 1..36: mol_type = other DNA
gttgaagttataccttagataacattactctcaaac

SEQ ID NO: 27545 - DNA, 36 bp, synthetic construct
  misc_feature 1..36: note = Synthetic oligonucleotide
  source 1..36: mol_type = other DNA
gttgaatatcgtctcaattttacatcaaaccacaac

SEQ ID NO: 27546 - DNA, 36 bp, synthetic construct
  misc_feature 1..36: note = Synthetic oligonucleotide
  source 1..36: mol_type = other DNA
gttgacggttgattgggaaatgctctttcacatact

SEQ ID NO: 27547 - DNA, 36 bp, synthetic construct; identical to SEQ ID NO: 12722
  misc_feature 1..36: note = Synthetic oligonucleotide
  source 1..36: mol_type = other DNA

SEQ ID NO: 27548 - DNA, 36 bp, synthetic construct; identical to SEQ ID NO: 12722
  misc_feature 1..36: note = Synthetic oligonucleotide
  source 1..36: mol_type = other DNA

SEQ ID NO: 27549 - DNA, 36 bp, synthetic construct
  misc_feature 1..36: note = Synthetic oligonucleotide
  source 1..36: mol_type = other DNA
gttgagaatctttcattattcgcctttgatatactt

SEQ ID NO: 27550 - DNA, 36 bp, synthetic construct
  misc_feature 1..36: note = Synthetic oligonucleotide
  source 1..36: mol_type = other DNA
gttgagaatctttcattattcggcttgatatactta

SEQ ID NO: 27551 - DNA, 27 bp, synthetic construct
  misc_feature 1..27: note = Synthetic oligonucleotide
  source 1..27: mol_type = other DNA
gttgatatctttgatattcggaacaac

SEQ ID NO: 27552 - DNA, 37 bp, synthetic construct
  misc_feature 1..37: note = Synthetic oligonucleotide
  source 1..37: mol_type = other DNA
gttgcaacggctgttgaaaggtcaggttggttgaaac

SEQ ID NO: 27553 - DNA, 36 bp, synthetic construct
  misc_feature 1..36: note = Synthetic oligonucleotide
  source 1..36: mol_type = other DNA
gttgcaactttacatctaaaaccaatatgctataat

SEQ ID NO: 27554 - DNA, 22 bp, synthetic construct
  misc_feature 1..22: note = Synthetic oligonucleotide
  source 1..22: mol_type = other DNA
gttgcaatcctcgtagacaagt

SEQ ID NO: 27555 - DNA, 32 bp, synthetic construct
  misc_feature 1..32: note = Synthetic oligonucleotide
  source 1..32: mol_type = other DNA
gttgcaatcctcgtagacaagtgggttgccag

SEQ ID NO: 27556 - DNA, 32 bp, synthetic construct; identical to SEQ ID NO: 27555
  misc_feature 1..32: note = Synthetic oligonucleotide
  source 1..32: mol_type = other DNA

SEQ ID NO: 27557 - DNA, 31 bp, synthetic construct
  misc_feature 1..31: note = Synthetic oligonucleotide
  source 1..31: mol_type = other DNA
gttgcaatcctcgtaggcaagtgggttgcca

SEQ ID NO: 27558 - DNA, 36 bp, synthetic construct
  misc_feature 1..36: note = Synthetic oligonucleotide
  source 1..36: mol_type = other DNA
gttgcaatttgctttcccttccatatgagctataat

SEQ ID NO: 27559 - DNA, 36 bp, synthetic construct; identical to SEQ ID NO: 12728
  misc_feature 1..36: note = Synthetic oligonucleotide
  source 1..36: mol_type = other DNA

SEQ ID NO: 27560 - DNA, 36 bp, synthetic construct; identical to SEQ ID NO: 12730
  misc_feature 1..36: note = Synthetic oligonucleotide
  source 1..36: mol_type = other DNA

SEQ ID NO: 27561 - DNA, 36 bp, synthetic construct; identical to SEQ ID NO: 12734
  misc_feature 1..36: note = Synthetic oligonucleotide
  source 1..36: mol_type = other DNA

SEQ ID NO: 27562 - DNA, 36 bp, synthetic construct; identical to SEQ ID NO: 12736
  misc_feature 1..36: note = Synthetic oligonucleotide
  source 1..36: mol_type = other DNA

SEQ ID NO: 27563 - DNA, 36 bp, synthetic construct; identical to SEQ ID NO: 12737
  misc_feature 1..36: note = Synthetic oligonucleotide
  source 1..36: mol_type = other DNA

SEQ ID NO: 27564 - DNA, 35 bp, synthetic construct
  misc_feature 1..35: note = Synthetic oligonucleotide
  source 1..35: mol_type = other DNA
gttgcagctggaccgcgatttctgaaatgctatga

SEQ ID NO: 27565 - DNA, 36 bp, synthetic construct; identical to SEQ ID NO: 12741
  misc_feature 1..36: note = Synthetic oligonucleotide
  source 1..36: mol_type = other DNA

SEQ ID NO: 27566 - DNA, 36 bp, synthetic construct
  misc_feature 1..36: note = Synthetic oligonucleotide
  source 1..36: mol_type = other DNA
gttgcagctggaccgcgatttctgaaccgctatgct

SEQ ID NO: 27567 - DNA, 36 bp, synthetic construct
  misc_feature 1..36: note = Synthetic oligonucleotide
  source 1..36: mol_type = other DNA
gttgcagctggaccgcgatttctgaactgctatgac

SEQ ID NO: 27568 - DNA, 36 bp, synthetic construct; identical to SEQ ID NO: 27567
  misc_feature 1..36: note = Synthetic oligonucleotide
  source 1..36: mol_type = other DNA

SEQ ID NO: 27569 - DNA, 36 bp, synthetic construct
  misc_feature 1..36: note = Synthetic oligonucleotide
  source 1..36: mol_type = other DNA
gttgcagctggaccgcgatttctgaactgctatgat

SEQ ID NO: 27570 - DNA, 36 bp, synthetic construct
  misc_feature 1..36: note = Synthetic oligonucleotide
  source 1..36: mol_type = other DNA
gttgcagctggaccgcgatttctgatctgctatgac

SEQ ID NO: 27571 - DNA, 36 bp, synthetic construct
  misc_feature 1..36: note = Synthetic oligonucleotide
  source 1..36: mol_type = other DNA
gttgcagctggaccgtgatttctgaactgctatgac

SEQ ID NO: 27572 - DNA, 36 bp, synthetic construct
  misc_feature 1..36: note = Synthetic oligonucleotide
  source 1..36: mol_type = other DNA
gttgcagctggacctcaatttctgaaatgctatgat

SEQ ID NO: 27573 - DNA, 36 bp, synthetic construct
  misc_feature 1..36: note = Synthetic oligonucleotide
  source 1..36: mol_type = other DNA
gttgcagcttgacaccaaacagctatttgtttttat

SEQ ID NO: 27574 - DNA, 36 bp, synthetic construct
  misc_feature 1..36: note = Synthetic oligonucleotide
  source 1..36: mol_type = other DNA
gttgcaggccgaccatttttctgagtaaactgaatt

SEQ ID NO: 27575 - DNA, 36 bp, synthetic construct; identical to SEQ ID NO: 27574
  misc_feature 1..36: note = Synthetic oligonucleotide
  source 1..36: mol_type = other DNA

SEQ ID NO: 27576 - DNA, 36 bp, synthetic construct
  misc_feature 1..36: note = Synthetic oligonucleotide
  source 1..36: mol_type = other DNA
gttgcaggctgctcgcgggctggggtcgattacact

SEQ ID NO: 27577 - DNA, 36 bp, synthetic construct; identical to SEQ ID NO: 27576
  misc_feature 1..36: note = Synthetic oligonucleotide
  source 1..36: mol_type = other DNA

SEQ ID NO: 27578 - DNA, 36 bp, synthetic construct; identical to SEQ ID NO: 12747
  misc_feature 1..36: note = Synthetic oligonucleotide
  source 1..36: mol_type = other DNA

SEQ ID NO: 27579 - DNA, 36 bp, synthetic construct; identical to SEQ ID NO: 12747
  misc_feature 1..36: note = Synthetic oligonucleotide
  source 1..36: mol_type = other DNA

SEQ ID NO: 27580 - DNA, 36 bp, synthetic construct; identical to SEQ ID NO: 12747
  misc_feature 1..36: note = Synthetic oligonucleotide
  source 1..36: mol_type = other DNA

SEQ ID NO: 27581 - DNA, 36 bp, synthetic construct; identical to SEQ ID NO: 12753
  misc_feature 1..36: note = Synthetic oligonucleotide
  source 1..36: mol_type = other DNA

SEQ ID NO: 27582 - DNA, 36 bp, synthetic construct; identical to SEQ ID NO: 12753
  misc_feature 1..36: note = Synthetic oligonucleotide
  source 1..36: mol_type = other DNA

SEQ ID NO: 27583 - DNA, 36 bp, synthetic construct; identical to SEQ ID NO: 12756
  misc_feature 1..36: note = Synthetic oligonucleotide
  source 1..36: mol_type = other DNA

SEQ ID NO: 27584 - DNA, 36 bp, synthetic construct
  misc_feature 1..36: note = Synthetic oligonucleotide
  source 1..36: mol_type = other DNA
gttgcagttggcctccgattccccaatcgctattct

SEQ ID NO: 27585 - DNA, 36 bp, synthetic construct; identical to SEQ ID NO: 27584
  misc_feature 1..36: note = Synthetic oligonucleotide
  source 1..36: mol_type = other DNA

SEQ ID NO: 27586 - DNA, 36 bp, synthetic construct
  misc_feature 1..36: note = Synthetic oligonucleotide
  source 1..36: mol_type = other DNA
gttgcagttggtctttcttgtccagagtgctagacc

SEQ ID NO: 27587 - DNA, 36 bp, synthetic construct
  misc_feature 1..36: note = Synthetic oligonucleotide
  source 1..36: mol_type = other DNA
gttgcagtttgacaccaaacagctattagattttat

SEQ ID NO: 27588 - DNA, 36 bp, synthetic construct
  misc_feature 1..36: note = Synthetic oligonucleotide
  source 1..36: mol_type = other DNA
gttgcagtttgacgccaattcctaatcagctataat

SEQ ID NO: 27589 - DNA, 33 bp, synthetic construct
  misc_feature 1..33: note = Synthetic oligonucleotide
  source 1..33: mol_type = other DNA
gttgcattagcgatacgaaggtactgaattgaa

SEQ ID NO: 27590 - DNA, 36 bp, synthetic construct
  misc_feature 1..36: note = Synthetic oligonucleotide
  source 1..36: mol_type = other DNA
gttgccgctggaccacgatctctgaacggctattct

SEQ ID NO: 27591 - DNA, 36 bp, synthetic construct
  misc_feature 1..36: note = Synthetic oligonucleotide
  source 1..36: mol_type = other DNA
gttgccgctggaccgcaatctctgagcggctatgct

SEQ ID NO: 27592 - DNA, 36 bp, synthetic construct; identical to SEQ ID NO: 27591
  misc_feature 1..36: note = Synthetic oligonucleotide
  source 1..36: mol_type = other DNA

SEQ ID NO: 27593 - DNA, 36 bp, synthetic construct
  misc_feature 1..36: note = Synthetic oligonucleotide
  source 1..36: mol_type = other DNA
gttgccgctggaccgccttctctgaactgctaggct

SEQ ID NO: 27594 - DNA, 36 bp, synthetic construct; identical to SEQ ID NO: 12770
  misc_feature 1..36: note = Synthetic oligonucleotide
  source 1..36: mol_type = other DNA

SEQ ID NO: 27595 - DNA, 36 bp, synthetic construct; identical to SEQ ID NO: 12771
  misc_feature 1..36: note = Synthetic oligonucleotide
  source 1..36: mol_type = other DNA

SEQ ID NO: 27596 - DNA, 36 bp, synthetic construct
  misc_feature 1..36: note = Synthetic oligonucleotide
  source 1..36: mol_type = other DNA
gttgccgctggaccgcgatctctgagcggctatgtt

SEQ ID NO: 27597 - DNA, 37 bp, synthetic construct
  misc_feature 1..37: note = Synthetic oligonucleotide
  source 1..37: mol_type = other DNA
gttgccgctggaccgcgatctctgagcggttataatg

SEQ ID NO: 27598 - DNA, 36 bp, synthetic construct
  misc_feature 1..36: note = Synthetic oligonucleotide
  source 1..36: mol_type = other DNA
gttgccgctggaccgcgatctctgagtggctatgat

SEQ ID NO: 27599 - DNA, 36 bp, synthetic construct; identical to SEQ ID NO: 12775
  misc_feature 1..36: note = Synthetic oligonucleotide
  source 1..36: mol_type = other DNA

SEQ ID NO: 27600 - DNA, 36 bp, synthetic construct
  misc_feature 1..36: note = Synthetic oligonucleotide
  source 1..36: mol_type = other DNA
gttgccgctggaccgcgttttctgaactgctacgct

SEQ ID NO: 27601 - DNA, 36 bp, synthetic construct
  misc_feature 1..36: note = Synthetic oligonucleotide
  source 1..36: mol_type = other DNA
gttgccgctggaccgctttttctgaactgctaggct

SEQ ID NO: 27602 - DNA, 36 bp, synthetic construct
  misc_feature 1..36: note = Synthetic oligonucleotide
  source 1..36: mol_type = other DNA
gttgccgttggaccgcgatctctgagcggctatggt

SEQ ID NO: 27603 - DNA, 36 bp, synthetic construct
  misc_feature 1..36: note = Synthetic oligonucleotide
  source 1..36: mol_type = other DNA
gttgccgttggaccgcgatttctgaactgctaggct

SEQ ID NO: 27604 - DNA, 36 bp, synthetic construct
  misc_feature 1..36: note = Synthetic oligonucleotide
  source 1..36: mol_type = other DNA
gttgccgttggcccgcgttttctgaactgataggct

SEQ ID NO: 27605 - DNA, 30 bp, synthetic construct
  misc_feature 1..30: note = Synthetic oligonucleotide
  source 1..30: mol_type = other DNA
gttgcgaattatccataaagataacaattt

SEQ ID NO: 27606 - DNA, 36 bp, synthetic construct
  misc_feature 1..36: note = Synthetic oligonucleotide
  source 1..36: mol_type = other DNA
gttgcgacttgacttcatttcctcatctgctacgct

SEQ ID NO: 27607 - DNA, 36 bp, synthetic construct; identical to SEQ ID NO: 12790
  misc_feature 1..36: note = Synthetic oligonucleotide
  source 1..36: mol_type = other DNA

SEQ ID NO: 27608 - DNA, 36 bp, synthetic construct; identical to SEQ ID NO: 12791
  misc_feature 1..36: note = Synthetic oligonucleotide
  source 1..36: mol_type = other DNA

SEQ ID NO: 27609 - DNA, 36 bp, synthetic construct
  misc_feature 1..36: note = Synthetic oligonucleotide
  source 1..36: mol_type = other DNA
gttgcgattggctcacagggcagagtcggatacact

SEQ ID NO: 27610 - DNA, 36 bp, synthetic construct
  misc_feature 1..36: note = Synthetic oligonucleotide
  source 1..36: mol_type = other DNA
gttgcgcgttgctcgcgggccgggatcagatacact

SEQ ID NO: 27611 - DNA, 36 bp, synthetic construct
  misc_feature 1..36: note = Synthetic oligonucleotide
  source 1..36: mol_type = other DNA
gttgcggattgaacccgggctgaggttggttacact

SEQ ID NO: 27612 - DNA, 36 bp, synthetic construct
  misc_feature 1..36: note = Synthetic oligonucleotide
  source 1..36: mol_type = other DNA
gttgcggattgaactcgtttcctgagttgttacaat

SEQ ID NO: 27613 - DNA, 36 bp, synthetic construct
  misc_feature 1..36: note = Synthetic oligonucleotide
  source 1..36: mol_type = other DNA
gttgcggattgacaccactttctgatttgctataac

SEQ ID NO: 27614 - DNA, 36 bp, synthetic construct; identical to SEQ ID NO: 27613
  misc_feature 1..36: note = Synthetic oligonucleotide
  source 1..36: mol_type = other DNA

SEQ ID NO: 27615 - DNA, 36 bp, synthetic construct; identical to SEQ ID NO: 27613
  misc_feature 1..36: note = Synthetic oligonucleotide
  source 1..36: mol_type = other DNA

SEQ ID NO: 27616 - DNA, 36 bp, synthetic construct; identical to SEQ ID NO: 27613
  misc_feature 1..36: note = Synthetic oligonucleotide
  source 1..36: mol_type = other DNA

SEQ ID NO: 27617 - DNA, 36 bp, synthetic construct; identical to SEQ ID NO: 27613
  misc_feature 1..36: note = Synthetic oligonucleotide
  source 1..36: mol_type = other DNA

SEQ ID NO: 27618 - DNA, 36 bp, synthetic construct
  misc_feature 1..36: note = Synthetic oligonucleotide
  source 1..36: mol_type = other DNA
gttgcggattgatcgcaggctggggtcgattacact

SEQ ID NO: 27619 - DNA, 36 bp, synthetic construct
  misc_feature 1..36: note = Synthetic oligonucleotide
  source 1..36: mol_type = other DNA
gttgcggattgatcgcgggccgggatcgattacact

SEQ ID NO: 27620 - DNA, 37 bp, synthetic construct
  misc_feature 1..37: note = Synthetic oligonucleotide
  source 1..37: mol_type = other DNA
gttgcggattgctagcagattggggttggctagactc

SEQ ID NO: 27621 - DNA, 36 bp, synthetic construct
  misc_feature 1..36: note = Synthetic oligonucleotide
  source 1..36: mol_type = other DNA
gttgcggattgctcacgggctagggtcgattacact

SEQ ID NO: 27622 - DNA, 36 bp, synthetic construct; identical to SEQ ID NO: 12814
  misc_feature 1..36: note = Synthetic oligonucleotide
  source 1..36: mol_type = other DNA

SEQ ID NO: 27623 - DNA, 36 bp, synthetic construct
  misc_feature 1..36: note = Synthetic oligonucleotide
  source 1..36: mol_type = other DNA
gttgcggattgctcgcaggcggggatcgattacact

SEQ ID NO: 27624 - DNA, 36 bp, synthetic construct; identical to SEQ ID NO: 12815
  misc_feature 1..36: note = Synthetic oligonucleotide
  source 1..36: mol_type = other DNA

SEQ ID NO: 27625 - DNA, 36 bp, synthetic construct
  misc_feature 1..36: note = Synthetic oligonucleotide
  source 1..36: mol_type = other DNA
gttgcggattgctcgcgggttcggatcgattacact

SEQ ID NO: 27626 - DNA, 36 bp, synthetic construct; identical to SEQ ID NO: 27625
  misc_feature 1..36: note = Synthetic oligonucleotide
  source 1..36: mol_type = other DNA

SEQ ID NO: 27627 - DNA, 36 bp, synthetic construct; identical to SEQ ID NO: 27625
  misc_feature 1..36: note = Synthetic oligonucleotide
  source 1..36: mol_type = other DNA

SEQ ID NO: 27628 - DNA, 37 bp, synthetic construct
  misc_feature 1..37: note = Synthetic oligonucleotide
  source 1..37: mol_type = other DNA
gttgcggattgctctcagggcggggttggatagactc

SEQ ID NO: 27629 - DNA, 36 bp, synthetic construct
  misc_feature 1..36: note = Synthetic oligonucleotide
  source 1..36: mol_type = other DNA
gttgcggattgctctcgggccggggtcgattacact

SEQ ID NO: 27630 - DNA, 36 bp, synthetic construct
  misc_feature 1..36: note = Synthetic oligonucleotide
  source 1..36: mol_type = other DNA
gttgcggattgcttacaagccagagtcggttacact

SEQ ID NO: 27631 - DNA, 36 bp, synthetic construct
  misc_feature 1..36: note = Synthetic oligonucleotide
  source 1..36: mol_type = other DNA
gttgcggattgcttacgggctgggatcgattacact

SEQ ID NO: 27632 - DNA, 37 bp, synthetic construct
  misc_feature 1..37: note = Synthetic oligonucleotide
  source 1..37: mol_type = other DNA
gttgcggattgcttgcaggtcgggattggatagactc

SEQ ID NO: 27633 - DNA, 36 bp, synthetic construct
  misc_feature 1..36: note = Synthetic oligonucleotide
  source 1..36: mol_type = other DNA
gttgcggattggtcccaggcagagatcggctacact

SEQ ID NO: 27634 - DNA, 36 bp, synthetic construct
  misc_feature 1..36: note = Synthetic oligonucleotide
  source 1..36: mol_type = other DNA
gttgcggattggtcgcaggccgggattggttacact

SEQ ID NO: 27635 - DNA, 36 bp, synthetic construct; identical to SEQ ID NO: 12824
  misc_feature 1..36: note = Synthetic oligonucleotide
  source 1..36: mol_type = other DNA

SEQ ID NO: 27636 - DNA, 36 bp, synthetic construct; identical to SEQ ID NO: 12824
  misc_feature 1..36: note = Synthetic oligonucleotide
  source 1..36: mol_type = other DNA

SEQ ID NO: 27637 - DNA, 36 bp, synthetic construct; identical to SEQ ID NO: 12824
  misc_feature 1..36: note = Synthetic oligonucleotide
  source 1..36: mol_type = other DNA

SEQ ID NO: 27638 - DNA, 36 bp, synthetic construct; identical to SEQ ID NO: 12824
  misc_feature 1..36: note = Synthetic oligonucleotide
  source 1..36: mol_type = other DNA

SEQ ID NO: 27639 - DNA, 36 bp, synthetic construct; identical to SEQ ID NO: 12824
  misc_feature 1..36: note = Synthetic oligonucleotide
  source 1..36: mol_type = other DNA

SEQ ID NO: 27640 - DNA, 37 bp, synthetic construct
  misc_feature 1..37: note = Synthetic oligonucleotide
  source 1..37: mol_type = other DNA
gttgcggccagagcgcgtttcccagtctgctaggttc

SEQ ID NO: 27641 - DNA, 36 bp, synthetic construct; identical to SEQ ID NO: 12825
  misc_feature 1..36: note = Synthetic oligonucleotide
  source 1..36: mol_type = other DNA

SEQ ID NO: 27642 - DNA, 36 bp, synthetic construct
  misc_feature 1..36: note = Synthetic oligonucleotide
  source 1..36: mol_type = other DNA
gttgcggccagggctcatttcccagagcgctaggct

SEQ ID NO: 27643 - DNA, 36 bp, synthetic construct
  misc_feature 1..36: note = Synthetic oligonucleotide
  source 1..36: mol_type = other DNA
gttgcggccggggctcatttcccagagcgatagact

SEQ ID NO: 27644 - DNA, 36 bp, synthetic construct; identical to SEQ ID NO: 12826
  misc_feature 1..36: note = Synthetic oligonucleotide
  source 1..36: mol_type = other DNA

SEQ ID NO: 27645 - DNA, 36 bp, synthetic construct
  misc_feature 1..36: note = Synthetic oligonucleotide
  source 1..36: mol_type = other DNA
gttgcggctgaccctcaatctctaagcggctacaat

SEQ ID NO: 27646 - DNA, 36 bp, synthetic construct
  misc_feature 1..36: note = Synthetic oligonucleotide
  source 1..36: mol_type = other DNA
gttgcggctggaccacgaattctgaactgctaatct

SEQ ID NO: 27647 - DNA, 36 bp, synthetic construct
  misc_feature 1..36: note = Synthetic oligonucleotide
  source 1..36: mol_type = other DNA
gttgcggctggaccacgctttccaagcgtctagact

SEQ ID NO: 27648 - DNA, 36 bp, synthetic construct; identical to SEQ ID NO: 12836
  misc_feature 1..36: note = Synthetic oligonucleotide
  source 1..36: mol_type = other DNA

SEQ ID NO: 27649 - DNA, 36 bp, synthetic construct; identical to SEQ ID NO: 12836
  misc_feature 1..36: note = Synthetic oligonucleotide
  source 1..36: mol_type = other DNA

SEQ ID NO: 27650 - DNA, 36 bp, synthetic construct; identical to SEQ ID NO: 12836
  misc_feature 1..36: note = Synthetic oligonucleotide
  source 1..36: mol_type = other DNA

SEQ ID NO: 27651 - DNA, 36 bp, synthetic construct; identical to SEQ ID NO: 12837
  misc_feature 1..36: note = Synthetic oligonucleotide
  source 1..36: mol_type = other DNA

SEQ ID NO: 27652 - DNA, 36 bp, synthetic construct; identical to SEQ ID NO: 12839
  misc_feature 1..36: note = Synthetic oligonucleotide
  source 1..36: mol_type = other DNA

SEQ ID NO: 27653 - DNA, 36 bp, synthetic construct; identical to SEQ ID NO: 12842
  misc_feature 1..36: note = Synthetic oligonucleotide
  source 1..36: mol_type = other DNA

SEQ ID NO: 27654 - DNA, 36 bp, synthetic construct
  misc_feature 1..36: note = Synthetic oligonucleotide
  source 1..36: mol_type = other DNA
gttgcggctggacctcgaattctgaacagctaaact

SEQ ID NO: 27655 - DNA, 36 bp, synthetic construct
  misc_feature 1..36: note = Synthetic oligonucleotide
  source 1..36: mol_type = other DNA
gttgcggctggacctcgaattctgaacagctattct

SEQ ID NO: 27656 - DNA, 36 bp, synthetic construct
  misc_feature 1..36: note = Synthetic oligonucleotide
  source 1..36: mol_type = other DNA
gttgcggctggacctcgaattctgaacggctacact

SEQ ID NO: 27657 - DNA, 36 bp, synthetic construct
  misc_feature 1..36: note = Synthetic oligonucleotide
  source 1..36: mol_type = other DNA
gttgcggctggacctcgaattctgaactgctagcct

SEQ ID NO: 27658 - DNA, 36 bp, synthetic construct; identical to SEQ ID NO: 12846
  misc_feature 1..36: note = Synthetic oligonucleotide
  source 1..36: mol_type = other DNA

SEQ ID NO: 27659 - DNA, 35 bp, synthetic construct
  misc_feature 1..35: note = Synthetic oligonucleotide
  source 1..35: mol_type = other DNA
gttgcggctggactgcgatttcctatcggctaaaa

SEQ ID NO: 27660 - DNA, 36 bp, synthetic construct
  misc_feature 1..36: note = Synthetic oligonucleotide
  source 1..36: mol_type = other DNA
gttgcggctggactgcggtttctgaatggttacaat

SEQ ID NO: 27661 - DNA, 36 bp, synthetic construct; identical to SEQ ID NO: 12848
  misc_feature 1..36: note = Synthetic oligonucleotide
  source 1..36: mol_type = other DNA

SEQ ID NO: 27662 - DNA, 36 bp, synthetic construct
  misc_feature 1..36: note = Synthetic oligonucleotide
  source 1..36: mol_type = other DNA
gttgcggctggccctcgatctctaagcggctaaact

SEQ ID NO: 27663 - DNA, 36 bp, synthetic construct; identical to SEQ ID NO: 27662
  misc_feature 1..36: note = Synthetic oligonucleotide
  source 1..36: mol_type = other DNA

SEQ ID NO: 27664 - DNA, 36 bp, synthetic construct; identical to SEQ ID NO: 27662
  misc_feature 1..36: note = Synthetic oligonucleotide
  source 1..36: mol_type = other DNA

SEQ ID NO: 27665 - DNA, 36 bp, synthetic construct
  misc_feature 1..36: note = Synthetic oligonucleotide
  source 1..36: mol_type = other DNA
gttgcggctggccttcgatctctaagcggctaaact

SEQ ID NO: 27666 - DNA, 36 bp, synthetic construct; identical to SEQ ID NO: 12856
  misc_feature 1..36: note = Synthetic oligonucleotide
  source 1..36: mol_type = other DNA

SEQ ID NO: 27667 - DNA, 36 bp, synthetic construct; identical to SEQ ID NO: 12856
  misc_feature 1..36: note = Synthetic oligonucleotide
  source 1..36: mol_type = other DNA

SEQ ID NO: 27668 - DNA, 36 bp, synthetic construct
  misc_feature 1..36: note = Synthetic oligonucleotide
  source 1..36: mol_type = other DNA
gttgcggctggtcctcgatctctaagcggctaaact

SEQ ID NO: 27669 - DNA, 36 bp, synthetic construct
  misc_feature 1..36: note = Synthetic oligonucleotide
  source 1..36: mol_type = other DNA
gttgcggctgtaccccgatctctaagcggctataat

SEQ ID NO: 27670 - DNA, 36 bp, synthetic construct
  misc_feature 1..36: note = Synthetic oligonucleotide
  source 1..36: mol_type = other DNA
gttgcggcttgaccactctttcctatttgctataat

SEQ ID NO: 27671 - DNA, 36 bp, synthetic construct
  misc_feature 1..36: note = Synthetic oligonucleotide
  source 1..36: mol_type = other DNA
gttgcggcttgaccccatttcctcatctgctactct

SEQ ID NO: 27672 - DNA, 36 bp, synthetic construct; identical to SEQ ID NO: 12860
  misc_feature 1..36: note = Synthetic oligonucleotide
  source 1..36: mol_type = other DNA

SEQ ID NO: 27673 - DNA, 36 bp, synthetic construct
  misc_feature 1..36: note = Synthetic oligonucleotide
  source 1..36: mol_type = other DNA
gttgcggcttgctcgcaggccaggatcgattacact

SEQ ID NO: 27674 - DNA, 36 bp, synthetic construct
  misc_feature 1..36: note = Synthetic oligonucleotide
  source 1..36: mol_type = other DNA
gttgcggcttgctcgcaggctgaggtcgattacact

SEQ ID NO: 27675 - DNA, 36 bp, synthetic construct; identical to SEQ ID NO: 12865
  misc_feature 1..36: note = Synthetic oligonucleotide
  source 1..36: mol_type = other DNA

SEQ ID NO: 27676 - DNA, 36 bp, synthetic construct; identical to SEQ ID NO: 12865
  misc_feature 1..36: note = Synthetic oligonucleotide
  source 1..36: mol_type = other DNA

SEQ ID NO: 27677 - DNA, 36 bp, synthetic construct
  misc_feature 1..36: note = Synthetic oligonucleotide
  source 1..36: mol_type = other DNA
gttgcggcttgctcgcgggccgggatcggatacact

SEQ ID NO: 27678 - DNA, 37 bp, synthetic construct
  misc_feature 1..37: note = Synthetic oligonucleotide
  source 1..37: mol_type = other DNA
gttgcggcttgctctcgatctctaagcggctacaatc

SEQ ID NO: 27679 - DNA, 36 bp, synthetic construct; identical to SEQ ID NO: 12871
  misc_feature 1..36: note = Synthetic oligonucleotide
  source 1..36: mol_type = other DNA

SEQ ID NO: 27680 - DNA, 36 bp, synthetic construct
  misc_feature 1..36: note = Synthetic oligonucleotide
  source 1..36: mol_type = other DNA
gttgcgggctgattccatttcttggtaagctgaatt

SEQ ID NO: 27681 - DNA, 36 bp, synthetic construct; identical to SEQ ID NO: 27680
  misc_feature 1..36: note = Synthetic oligonucleotide
  source 1..36: mol_type = other DNA

SEQ ID NO: 27682 - DNA, 36 bp, synthetic construct; identical to SEQ ID NO: 12873
  misc_feature 1..36: note = Synthetic oligonucleotide
  source 1..36: mol_type = other DNA

SEQ ID NO: 27683 - DNA, 36 bp, synthetic construct
  misc_feature 1..36: note = Synthetic oligonucleotide
  source 1..36: mol_type = other DNA
gttgcgggttgaccagaatttctgaatagctacact

SEQ ID NO: 27684 - DNA, 36 bp, synthetic construct
  misc_feature 1..36: note = Synthetic oligonucleotide
  source 1..36: mol_type = other DNA
gttgcgggttgactccatctacggatcaggtacaat

SEQ ID NO: 27685 - DNA, 36 bp, synthetic construct
  misc_feature 1..36: note = Synthetic oligonucleotide
  source 1..36: mol_type = other DNA
gttgcgggttgatttcaggccaaggtcgattacact

SEQ ID NO: 27686 - DNA, 36 bp, synthetic construct
  misc_feature 1..36: note = Synthetic oligonucleotide
  source 1..36: mol_type = other DNA
gttgcgggttgcccccaaggccggaatgtctaagct

SEQ ID NO: 27687 - DNA, 36 bp, synthetic construct; identical to SEQ ID NO: 27686
  misc_feature 1..36: note = Synthetic oligonucleotide
  source 1..36: mol_type = other DNA

SEQ ID NO: 27688 - DNA, 36 bp, synthetic construct; identical to SEQ ID NO: 12882
  misc_feature 1..36: note = Synthetic oligonucleotide
  source 1..36: mol_type = other DNA

SEQ ID NO: 27689 - DNA, 36 bp, synthetic construct
  misc_feature 1..36: note = Synthetic oligonucleotide
  source 1..36: mol_type = other DNA
gttgcgggttggacgccggccgggatcggttacact

SEQ ID NO: 27690 - DNA, 36 bp, synthetic construct
  misc_feature 1..36: note = Synthetic oligonucleotide
  source 1..36: mol_type = other DNA
gttgcgggttggctgcgggtcgtggttgaatagatc

SEQ ID NO: 27691 - DNA, 36 bp, synthetic construct
  misc_feature 1..36: note = Synthetic oligonucleotide
  source 1..36: mol_type = other DNA
gttgcggtgggaccacgccgcgtcgtctgctagaac

SEQ ID NO: 27692 - DNA, 36 bp, synthetic construct; identical to SEQ ID NO: 12886
  misc_feature 1..36: note = Synthetic oligonucleotide
  source 1..36: mol_type = other DNA

SEQ ID NO: 27693 - DNA, 36 bp, synthetic construct
  misc_feature 1..36: note = Synthetic oligonucleotide
  source 1..36: mol_type = other DNA
gttgcggttcccggccgaatcggtattcgctacaat

SEQ ID NO: 27694 - DNA, 36 bp, synthetic construct; identical to SEQ ID NO: 12887
  misc_feature 1..36: note = Synthetic oligonucleotide
  source 1..36: mol_type = other DNA

SEQ ID NO: 27695 - DNA, 36 bp, synthetic construct; identical to SEQ ID NO: 12888
  misc_feature 1..36: note = Synthetic oligonucleotide
  source 1..36: mol_type = other DNA

SEQ ID NO: 27696 - DNA, 36 bp, synthetic construct; identical to SEQ ID NO: 12888
  misc_feature 1..36: note = Synthetic oligonucleotide
  source 1..36: mol_type = other DNA

SEQ ID NO: 27697 - DNA, 36 bp, synthetic construct
  misc_feature 1..36: note = Synthetic oligonucleotide
  source 1..36: mol_type = other DNA
gttgcggttggaccacgaatccctatcggctagagt

SEQ ID NO: 27698 - DNA, 36 bp, synthetic construct; identical to SEQ ID NO: 27697
  misc_feature 1..36: note = Synthetic oligonucleotide
  source 1..36: mol_type = other DNA

SEQ ID NO: 27699 - DNA, 36 bp, synthetic construct
  misc_feature 1..36: note = Synthetic oligonucleotide
  source 1..36: mol_type = other DNA
gttgcggttggaccgcaccgttttcaatgctaactt

SEQ ID NO: 27700 - DNA, 37 bp, synthetic construct
  misc_feature 1..37: note = Synthetic oligonucleotide
  source 1..37: mol_type = other DNA
gttgcggttggaccgcgaatccctatcggctaaagta

SEQ ID NO: 27701 - DNA, 36 bp, synthetic construct
  misc_feature 1..36: note = Synthetic oligonucleotide
  source 1..36: mol_type = other DNA
gttgcggttggaccgcgatttcctatcggctaaact

SEQ ID NO: 27702 - DNA, 36 bp, synthetic construct
  misc_feature 1..36: note = Synthetic oligonucleotide
  source 1..36: mol_type = other DNA
gttgcggttggaccgcgttttccggaatgctacgct

SEQ ID NO: 27703 - DNA, 36 bp, synthetic construct
  misc_feature 1..36: note = Synthetic oligonucleotide
  source 1..36: mol_type = other DNA
gttgcggttggaccgcgttttctgaacggctatagt

SEQ ID NO: 27704 - DNA, 36 bp, synthetic construct
  misc_feature 1..36: note = Synthetic oligonucleotide
  source 1..36: mol_type = other DNA
gttgcggttggcccacaatctctcttctgctaaaac

SEQ ID NO: 27705 - DNA, 36 bp, synthetic construct
  misc_feature 1..36: note = Synthetic oligonucleotide
  source 1..36: mol_type = other DNA
gttgcggttggcccccattcccccatcggctagact

SEQ ID NO: 27706 - DNA, 36 bp, synthetic construct; identical to SEQ ID NO: 12903
  misc_feature 1..36: note = Synthetic oligonucleotide
  source 1..36: mol_type = other DNA

SEQ ID NO: 27707 - DNA, 37 bp, synthetic construct
  misc_feature 1..37: note = Synthetic oligonucleotide
  source 1..37: mol_type = other DNA
gttgcggttggcccgcgaatccctgtcggctaacctc

SEQ ID NO: 27708 - DNA, 36 bp, synthetic construct; identical to SEQ ID NO: 12906
  misc_feature 1..36: note = Synthetic oligonucleotide
  source 1..36: mol_type = other DNA

SEQ ID NO: 27709 - DNA, 36 bp, synthetic construct
  misc_feature 1..36: note = Synthetic oligonucleotide
  source 1..36: mol_type = other DNA
gttgcggttggcccgcgatttctgaactgctagctc

SEQ ID NO: 27710 - DNA, 36 bp, synthetic construct; identical to SEQ ID NO: 27709
  misc_feature 1..36: note = Synthetic oligonucleotide
  source 1..36: mol_type = other DNA

SEQ ID NO: 27711 - DNA, 36 bp, synthetic construct; identical to SEQ ID NO: 12907
  misc_feature 1..36: note = Synthetic oligonucleotide
  source 1..36: mol_type = other DNA

SEQ ID NO: 27712 - DNA, 36 bp, synthetic construct; identical to SEQ ID NO: 12910
  misc_feature 1..36: note = Synthetic oligonucleotide
  source 1..36: mol_type = other DNA

SEQ ID NO: 27713 - DNA, 36 bp, synthetic construct; identical to SEQ ID NO: 12911
  misc_feature 1..36: note = Synthetic oligonucleotide
  source 1..36: mol_type = other DNA

SEQ ID NO: 27714 - DNA, 37 bp, synthetic construct
  misc_feature 1..37: note = Synthetic oligonucleotide
  source 1..37: mol_type = other DNA
gttgcggttggccctcaatcaccagaccgctaatata

SEQ ID NO: 27715 - DNA, 36 bp, synthetic construct; identical to SEQ ID NO: 12913
  misc_feature 1..36: note = Synthetic oligonucleotide
  source 1..36: mol_type = other DNA

SEQ ID NO: 27716 - DNA, 36 bp, synthetic construct; identical to SEQ ID NO: 12913
  misc_feature 1..36: note = Synthetic oligonucleotide
  source 1..36: mol_type = other DNA

SEQ ID NO: 27717 - DNA, 36 bp, synthetic construct
  misc_feature 1..36: note = Synthetic oligonucleotide
  source 1..36: mol_type = other DNA
gttgcggttggccctcaatcaccagactgctaagct

SEQ ID NO: 27718 - DNA, 36 bp, synthetic construct; identical to SEQ ID NO: 12915
  misc_feature 1..36: note = Synthetic oligonucleotide
  source 1..36: mol_type = other DNA

SEQ ID NO: 27719 - DNA, 36 bp, synthetic construct
  misc_feature 1..36: note = Synthetic oligonucleotide
  source 1..36: mol_type = other DNA
gttgcggttggccctcaatcagcagaccgctaaact

SEQ ID NO: 27720 - DNA, 36 bp, synthetic construct
  misc_feature 1..36: note = Synthetic oligonucleotide
  source 1..36: mol_type = other DNA
gttgcggttggccctcgatcaccagaccgctaaact

SEQ ID NO: 27721 - DNA, 36 bp, synthetic construct; identical to SEQ ID NO: 27720
  misc_feature 1..36: note = Synthetic oligonucleotide
  source 1..36: mol_type = other DNA

SEQ ID NO: 27722 - DNA, 36 bp, synthetic construct; identical to SEQ ID NO: 27720
  misc_feature 1..36: note = Synthetic oligonucleotide
  source 1..36: mol_type = other DNA

SEQ ID NO: 27723 - DNA, 36 bp, synthetic construct
  misc_feature 1..36: note = Synthetic oligonucleotide
  source 1..36: mol_type = other DNA
gttgcggttggccctcgatcaccagactgctataac

SEQ ID NO: 27724 - DNA, 36 bp, synthetic construct; identical to SEQ ID NO: 27723
  misc_feature 1..36: note = Synthetic oligonucleotide
  source 1..36: mol_type = other DNA

SEQ ID NO: 27725 - DNA, 36 bp, synthetic construct
  misc_feature 1..36: note = Synthetic oligonucleotide
  source 1..36: mol_type = other DNA
gttgcggttggccctcgatcacccggccgctaaact

SEQ ID NO: 27726 - DNA, 36 bp, synthetic construct
  misc_feature 1..36: note = Synthetic oligonucleotide
  source 1..36: mol_type = other DNA
gttgcggttggcctgcgatttctgaactgctaaacc

SEQ ID NO: 27727 - DNA, 36 bp, synthetic construct
  misc_feature 1..36: note = Synthetic oligonucleotide
  source 1..36: mol_type = other DNA
gttgcggttggcctgcgatttctgaactgctaggct

SEQ ID NO: 27728 - DNA, 36 bp, synthetic construct; identical to SEQ ID NO: 12917
  misc_feature 1..36: note = Synthetic oligonucleotide
  source 1..36: mol_type = other DNA

SEQ ID NO: 27729 - DNA, 36 bp, synthetic construct; identical to SEQ ID NO: 12917
  misc_feature 1..36: note = Synthetic oligonucleotide
  source 1..36: mol_type = other DNA

SEQ ID NO: 27730 - DNA, 37 bp, synthetic construct; identical to SEQ ID NO: 12918
  misc_feature 1..37: note = Synthetic oligonucleotide
  source 1..37: mol_type = other DNA

SEQ ID NO: 27731 - DNA, 36 bp, synthetic construct
  misc_feature 1..36: note = Synthetic oligonucleotide
  source 1..36: mol_type = other DNA
gttgcggttggcgcgcgatttcctatcggctaaact

SEQ ID NO: 27732 - DNA, 36 bp, synthetic construct
  misc_feature 1..36: note = Synthetic oligonucleotide
  source 1..36: mol_type = other DNA
gttgcggttggctctcaatcaccagaccgctaagct

SEQ ID NO: 27733 - DNA, 36 bp, synthetic construct
  misc_feature 1..36: note = Synthetic oligonucleotide
  source 1..36: mol_type = other DNA
gttgcggttggctctcactcaccagaccgctaagct

SEQ ID NO: 27734 - DNA, 36 bp, synthetic construct
  misc_feature 1..36: note = Synthetic oligonucleotide
  source 1..36: mol_type = other DNA
gttgcggttggctctcgatctctgaactgctaaacc

SEQ ID NO: 27735 - DNA, 36 bp, synthetic construct
  misc_feature 1..36: note = Synthetic oligonucleotide
  source 1..36: mol_type = other DNA
gttgcggttgggccgcaccgcgttccctgctagaac

SEQ ID NO: 27736 - DNA, 37 bp, synthetic construct
  misc_feature 1..37: note = Synthetic oligonucleotide
  source 1..37: mol_type = other DNA
gttgcggttgggccgcgatcccctatcggctaaactc

SEQ ID NO: 27737 - DNA, 36 bp, synthetic construct
  misc_feature 1..36: note = Synthetic oligonucleotide
  source 1..36: mol_type = other DNA
gttgcggttggtcctcaatcaccagactgctaagct

SEQ ID NO: 27738 - DNA, 36 bp, synthetic construct; identical to SEQ ID NO: 27737
  misc_feature 1..36: note = Synthetic oligonucleotide
  source 1..36: mol_type = other DNA

SEQ ID NO: 27739 - DNA, 36 bp, synthetic construct; identical to SEQ ID NO: 12936
  misc_feature 1..36: note = Synthetic oligonucleotide
  source 1..36: mol_type = other DNA

SEQ ID NO: 27740 - DNA, 36 bp, synthetic construct; identical to SEQ ID NO: 12941
  misc_feature 1..36: note = Synthetic oligonucleotide
  source 1..36: mol_type = other DNA

SEQ ID NO: 27741 - DNA, 36 bp, synthetic construct
  misc_feature 1..36: note = Synthetic oligonucleotide
  source 1..36: mol_type = other DNA
gttgcggtttgatgtagaagtaagatataacacaac

SEQ ID NO: 27742 - DNA, 36 bp, synthetic construct
  misc_feature 1..36: note = Synthetic oligonucleotide
  source 1..36: mol_type = other DNA
gttgcggtttgatgtagaatatagataaaaagcaac

SEQ ID NO: 27743 - DNA, 36 bp, synthetic construct; identical to SEQ ID NO: 27742
  misc_feature 1..36: note = Synthetic oligonucleotide
  source 1..36: mol_type = other DNA

SEQ ID NO: 27744 - DNA, 36 bp, synthetic construct; identical to SEQ ID NO: 27742
  misc_feature 1..36: note = Synthetic oligonucleotide
  source 1..36: mol_type = other DNA

SEQ ID NO: 27745 - DNA, 36 bp, synthetic construct; identical to SEQ ID NO: 12944
  misc_feature 1..36: note = Synthetic oligonucleotide
  source 1..36: mol_type = other DNA

SEQ ID NO: 27746 - DNA, 36 bp, synthetic construct; identical to SEQ ID NO: 12944
  misc_feature 1..36: note = Synthetic oligonucleotide
  source 1..36: mol_type = other DNA

SEQ ID NO: 27747 - DNA, 36 bp, synthetic construct; identical to SEQ ID NO: 12945
  misc_feature 1..36: note = Synthetic oligonucleotide
  source 1..36: mol_type = other DNA

SEQ ID NO: 27748 - DNA, 36 bp, synthetic construct; identical to SEQ ID NO: 12946
  misc_feature 1..36: note = Synthetic oligonucleotide
  source 1..36: mol_type = other DNA

SEQ ID NO: 27749 - DNA, 36 bp, synthetic construct
  misc_feature 1..36: note = Synthetic oligonucleotide
  source 1..36: mol_type = other DNA
gttgcggtttgatgtaggatgataagaagatacaac

SEQ ID NO: 27750 - DNA, 36 bp, synthetic construct; identical to SEQ ID NO: 12947
  misc_feature 1..36: note = Synthetic oligonucleotide
  source 1..36: mol_type = other DNA

SEQ ID NO: 27751 - DNA, 36 bp, synthetic construct; identical to SEQ ID NO: 12947
  misc_feature 1..36: note = Synthetic oligonucleotide
  source 1..36: mol_type = other DNA

SEQ ID NO: 27752 - DNA, 36 bp, synthetic construct; identical to SEQ ID NO: 12947
  misc_feature 1..36: note = Synthetic oligonucleotide
  source 1..36: mol_type = other DNA

SEQ ID NO: 27753 - DNA, 36 bp, synthetic construct; identical to SEQ ID NO: 12947
  misc_feature 1..36: note = Synthetic oligonucleotide
  source 1..36: mol_type = other DNA

SEQ ID NO: 27754 - DNA, 36 bp, synthetic construct; identical to SEQ ID NO: 12947
  misc_feature 1..36: note = Synthetic oligonucleotide
  source 1..36: mol_type = other DNA

SEQ ID NO: 27755 - DNA, 36 bp, synthetic construct
  misc_feature 1..36: note = Synthetic oligonucleotide
  source 1..36: mol_type = other DNA
gttgcggtttgctcctaggctgggatcagttacact

SEQ ID NO: 27756 - DNA, 36 bp, synthetic construct
  misc_feature 1..36: note = Synthetic oligonucleotide
  source 1..36: mol_type = other DNA
gttgcgttatatctttcttctacatcaaaccacaac

SEQ ID NO: 27757 - DNA, 36 bp, synthetic construct
  misc_feature 1..36: note = Synthetic oligonucleotide
  source 1..36: mol_type = other DNA
gttgctgctggaccgcgaattttgaacagctacaat

SEQ ID NO: 27758 - DNA, 36 bp, synthetic construct
  misc_feature 1..36: note = Synthetic oligonucleotide
  source 1..36: mol_type = other DNA
gttgctgctggaccgcgttttctgaactgctacgct

SEQ ID NO: 27759 - DNA, 36 bp, synthetic construct
  misc_feature 1..36: note = Synthetic oligonucleotide
  source 1..36: mol_type = other DNA
gttgctttataaattgtttctacatcaaaccgcaac

SEQ ID NO: 27760 - DNA, 36 bp, synthetic construct
  misc_feature 1..36: note = Synthetic oligonucleotide
  source 1..36: mol_type = other DNA
gttgctttatatcttttttctacatcaaaccacaac

SEQ ID NO: 27761 - DNA, 36 bp, synthetic construct; identical to SEQ ID NO: 27760
  misc_feature 1..36: note = Synthetic oligonucleotide
  source 1..36: mol_type = other DNA

SEQ ID NO: 27762 - DNA, 36 bp, synthetic construct
  misc_feature 1..36: note = Synthetic oligonucleotide
  source 1..36: mol_type = other DNA
gttgctttttatctatattctacatcaaaccgcaac

SEQ ID NO: 27763 - DNA, 36 bp, synthetic construct
  misc_feature 1..36: note = Synthetic oligonucleotide
  source 1..36: mol_type = other DNA
gttggaaatcactctccgttacagctggtagactag

SEQ ID NO: 27764 - DNA, 36 bp, synthetic construct
  misc_feature 1..36: note = Synthetic oligonucleotide
  source 1..36: mol_type = other DNA
gttggaaatcagtcacctctccctttgatagactta

SEQ ID NO: 27765 - DNA, 36 bp, synthetic construct; identical to SEQ ID NO: 27764
  misc_feature 1..36: note = Synthetic oligonucleotide
  source 1..36: mol_type = other DNA

SEQ ID NO: 27766 - DNA, 36 bp, synthetic construct
  misc_feature 1..36: note = Synthetic oligonucleotide
  source 1..36: mol_type = other DNA
gttggacattatcaaaaattatcagtatcttaaaac

SEQ ID NO: 27767 - DNA, 36 bp, synthetic construct; identical to SEQ ID NO: 27766
  misc_feature 1..36: note = Synthetic oligonucleotide
  source 1..36: mol_type = other DNA

SEQ ID NO: 27768 - DNA, 36 bp, synthetic construct; identical to SEQ ID NO: 27766
  misc_feature 1..36: note = Synthetic oligonucleotide
  source 1..36: mol_type = other DNA

SEQ ID NO: 27769 - DNA, 36 bp, synthetic construct
  misc_feature 1..36: note = Synthetic oligonucleotide
  source 1..36: mol_type = other DNA
gttggacattatcaaaaattgtcagtatcttaaaac

SEQ ID NO: 27770 - DNA, 36 bp, synthetic construct
  misc_feature 1..36: note = Synthetic oligonucleotide
  source 1..36: mol_type = other DNA
gttgggaaatgtctctctccctctgctgtaaacttc

SEQ ID NO: 27771 - DNA, 36 bp, synthetic construct; identical to SEQ ID NO: 27770
  misc_feature 1..36: note = Synthetic oligonucleotide
  source 1..36: mol_type = other DNA

SEQ ID NO: 27772 - DNA, 36 bp, synthetic construct
  misc_feature 1..36: note = Synthetic oligonucleotide
  source 1..36: mol_type = other DNA
gttgggaaccttcattctgtagccttgatagactta

SEQ ID NO: 27773 - DNA, 36 bp, synthetic construct; identical to SEQ ID NO: 27772
  misc_feature 1..36: note = Synthetic oligonucleotide
  source 1..36: mol_type = other DNA

SEQ ID NO: 27774 - DNA, 36 bp, synthetic construct; identical to SEQ ID NO: 27772
  misc_feature 1..36: note = Synthetic oligonucleotide
  source 1..36: mol_type = other DNA

SEQ ID NO: 27775 - DNA, 36 bp, synthetic construct; identical to SEQ ID NO: 27772
  misc_feature 1..36: note = Synthetic oligonucleotide
  source 1..36: mol_type = other DNA

SEQ ID NO: 27776 - DNA, 36 bp, synthetic construct; identical to SEQ ID NO: 27772
  misc_feature 1..36: note = Synthetic oligonucleotide
  source 1..36: mol_type = other DNA

SEQ ID NO: 27777 - DNA, 36 bp, synthetic construct; identical to SEQ ID NO: 27772
  misc_feature 1..36: note = Synthetic oligonucleotide
  source 1..36: mol_type = other DNA

SEQ ID NO: 27778 - DNA, 36 bp, synthetic construct
  misc_feature 1..36: note = Synthetic oligonucleotide
  source 1..36: mol_type = other DNA
gttgggaagagtccttctagatcccaactacgcttc

SEQ ID NO: 27779 - DNA, 36 bp, synthetic construct
  misc_feature 1..36: note = Synthetic oligonucleotide
  source 1..36: mol_type = other DNA
gttgggaagtacgttcgtctctccgcagtagacttc

SEQ ID NO: 27780 - DNA, 36 bp, synthetic construct; identical to SEQ ID NO: 12970
  misc_feature 1..36: note = Synthetic oligonucleotide
  source 1..36: mol_type = other DNA

SEQ ID NO: 27781 - DNA, 36 bp, synthetic construct; identical to SEQ ID NO: 12970
  misc_feature 1..36: note = Synthetic oligonucleotide
  source 1..36: mol_type = other DNA

SEQ ID NO: 27782 - DNA, 36 bp, synthetic construct; identical to SEQ ID NO: 12970
  misc_feature 1..36: note = Synthetic oligonucleotide
  source 1..36: mol_type = other DNA

SEQ ID NO: 27783 - DNA, 36 bp, synthetic construct; identical to SEQ ID NO: 12970
  misc_feature 1..36: note = Synthetic oligonucleotide
  source 1..36: mol_type = other DNA

SEQ ID NO: 27784 - DNA, 36 bp, synthetic construct; identical to SEQ ID NO: 12970
  misc_feature 1..36: note = Synthetic oligonucleotide
  source 1..36: mol_type = other DNA

SEQ ID NO: 27785 - DNA, 36 bp, synthetic construct; identical to SEQ ID NO: 12970
  misc_feature 1..36: note = Synthetic oligonucleotide
  source 1..36: mol_type = other DNA

SEQ ID NO: 27786 - DNA, 36 bp, synthetic construct; identical to SEQ ID NO: 12970
  misc_feature 1..36: note = Synthetic oligonucleotide
  source 1..36: mol_type = other DNA

SEQ ID NO: 27787 - DNA, 36 bp, synthetic construct; identical to SEQ ID NO: 12970
  misc_feature 1..36: note = Synthetic oligonucleotide
  source 1..36: mol_type = other DNA

SEQ ID NO: 27788 - DNA, 36 bp, synthetic construct; identical to SEQ ID NO: 12970
  misc_feature 1..36: note = Synthetic oligonucleotide
  source 1..36: mol_type = other DNA

SEQ ID NO: 27789 - DNA, 36 bp, synthetic construct; identical to SEQ ID NO: 12970
  misc_feature 1..36: note = Synthetic oligonucleotide
  source 1..36: mol_type = other DNA

SEQ ID NO: 27790 - DNA, 36 bp, synthetic construct; identical to SEQ ID NO: 12970
  misc_feature 1..36: note = Synthetic oligonucleotide
  source 1..36: mol_type = other DNA

SEQ ID NO: 27791 - DNA, 36 bp, synthetic construct; identical to SEQ ID NO: 12973
  misc_feature 1..36: note = Synthetic oligonucleotide
  source 1..36: mol_type = other DNA

SEQ ID NO: 27792 - DNA, 29 bp, synthetic construct
  misc_feature 1..29: note = Synthetic oligonucleotide
  source 1..29: mol_type = other DNA
gttgggaatcataagtaaaagtacaattt

SEQ ID NO: 27793 - DNA, 36 bp, synthetic construct
  misc_feature 1..36: note = Synthetic oligonucleotide
  source 1..36: mol_type = other DNA
gttgggaatcatcgtcctaccgcccagctaggcttg

SEQ ID NO: 27794 - DNA, 36 bp, synthetic construct; identical to SEQ ID NO: 12975
  misc_feature 1..36: note = Synthetic oligonucleotide
  source 1..36: mol_type = other DNA

SEQ ID NO: 27795 - DNA, 36 bp, synthetic construct; identical to SEQ ID NO: 12976
  misc_feature 1..36: note = Synthetic oligonucleotide
  source 1..36: mol_type = other DNA

SEQ ID NO: 27796 - DNA, 36 bp, synthetic construct; identical to SEQ ID NO: 12977
  misc_feature 1..36: note = Synthetic oligonucleotide
  source 1..36: mol_type = other DNA

SEQ ID NO: 27797 - DNA, 36 bp, synthetic construct; identical to SEQ ID NO: 12977
  misc_feature 1..36: note = Synthetic oligonucleotide
  source 1..36: mol_type = other DNA

SEQ ID NO: 27798 - DNA, 36 bp, synthetic construct; identical to SEQ ID NO: 12977
  misc_feature 1..36: note = Synthetic oligonucleotide
  source 1..36: mol_type = other DNA

SEQ ID NO: 27799 - DNA, 36 bp, synthetic construct; identical to SEQ ID NO: 12977
  misc_feature 1..36: note = Synthetic oligonucleotide
  source 1..36: mol_type = other DNA

SEQ ID NO: 27800 - DNA, 36 bp, synthetic construct; identical to SEQ ID NO: 12977
  misc_feature 1..36: note = Synthetic oligonucleotide
  source 1..36: mol_type = other DNA

SEQ ID NO: 27801 - DNA, 32 bp, synthetic construct
  misc_feature 1..32: note = Synthetic oligonucleotide
  source 1..32: mol_type = other DNA
gttgggaattgctttcaaataaaagtctttgg

SEQ ID NO: 27802 - DNA, 36 bp, synthetic construct; identical to SEQ ID NO: 12986
  misc_feature 1..36: note = Synthetic oligonucleotide
  source 1..36: mol_type = other DNA

SEQ ID NO: 27803 - DNA, 36 bp, synthetic construct; identical to SEQ ID NO: 12986
  misc_feature 1..36: note = Synthetic oligonucleotide
  source 1..36: mol_type = other DNA

SEQ ID NO: 27804 - DNA, 36 bp, synthetic construct; identical to SEQ ID NO: 12986
  misc_feature 1..36: note = Synthetic oligonucleotide
  source 1..36: mol_type = other DNA

SEQ ID NO: 27805 - DNA, 36 bp, synthetic construct
  misc_feature 1..36: note = Synthetic oligonucleotide
  source 1..36: mol_type = other DNA
gttggggagaccggttagattccgctgagatacact

SEQ ID NO: 27806 - DNA, 36 bp, synthetic construct; identical to SEQ ID NO: 12988
  misc_feature 1..36: note = Synthetic oligonucleotide
  source 1..36: mol_type = other DNA

SEQ ID NO: 27807 - DNA, 36 bp, synthetic construct
  misc_feature 1..36: note = Synthetic oligonucleotide
  source 1..36: mol_type = other DNA
gttggggatgattgctgatctttgttaagatgaacc

SEQ ID NO: 27808 - DNA, 36 bp, synthetic construct; identical to SEQ ID NO: 27807
  misc_feature 1..36: note = Synthetic oligonucleotide
  source 1..36: mol_type = other DNA

SEQ ID NO: 27809 - DNA, 36 bp, synthetic construct
  misc_feature 1..36: note = Synthetic oligonucleotide
  source 1..36: mol_type = other DNA
gttggggattgctcccaggctcttatcagatatact

SEQ ID NO: 27810 - DNA, 36 bp, synthetic construct
  misc_feature 1..36: note = Synthetic oligonucleotide
  source 1..36: mol_type = other DNA
gttggggcacccaggcagacgtccttcagatacact

SEQ ID NO: 27811 - DNA, 36 bp, synthetic construct
  misc_feature 1..36: note = Synthetic oligonucleotide
  source 1..36: mol_type = other DNA
gttggggcttgacaggaactgcggctcaagtacaat

SEQ ID NO: 27812 - DNA, 36 bp, synthetic construct; identical to SEQ ID NO: 27811
  misc_feature 1..36: note = Synthetic oligonucleotide
  source 1..36: mol_type = other DNA

SEQ ID NO: 27813 - DNA, 36 bp, synthetic construct; identical to SEQ ID NO: 27811
  misc_feature 1..36: note = Synthetic oligonucleotide
  source 1..36: mol_type = other DNA

SEQ ID NO: 27814 - DNA, 36 bp, synthetic construct
  misc_feature 1..36: note = Synthetic oligonucleotide
  source 1..36: mol_type = other DNA
gttggggcttgtagagtttaagaagtgtgctatatt

SEQ ID NO: 27815 - DNA, 36 bp, synthetic construct
  misc_feature 1..36: note = Synthetic oligonucleotide
  source 1..36: mol_type = other DNA
gttggggttcgtcgggaagcgctctccagatacact

SEQ ID NO: 27816 - DNA, 36 bp, synthetic construct
  misc_feature 1..36: note = Synthetic oligonucleotide
  source 1..36: mol_type = other DNA
gttgtaaaagaacaatacttgaagccaagttacaac

SEQ ID NO: 27817 - DNA, 36 bp, synthetic construct
  misc_feature 1..36: note = Synthetic oligonucleotide
  source 1..36: mol_type = other DNA
gttgtaaaaggatgacaaaaaaagatgacaaacaat

SEQ ID NO: 27818 - DNA, 36 bp, synthetic construct
  misc_feature 1..36: note = Synthetic oligonucleotide
  source 1..36: mol_type = other DNA
gttgtaaatcttccttattctacatcaaaccacaac

SEQ ID NO: 27819 - DNA, 33 bp, synthetic construct
  misc_feature 1..33: note = Synthetic oligonucleotide
  source 1..33: mol_type = other DNA
gttgtaaattatccctaaagatataattttgaa

SEQ ID NO: 27820 - DNA, 34 bp, synthetic construct
  misc_feature 1..34: note = Synthetic oligonucleotide
  source 1..34: mol_type = other DNA
gttgtaacctatccgtaaaaataataaaattgaa

SEQ ID NO: 27821 - DNA, 34 bp, synthetic construct; identical to SEQ ID NO: 27820
  misc_feature 1..34: note = Synthetic oligonucleotide
  source 1..34: mol_type = other DNA

SEQ ID NO: 27822 - DNA, 35 bp, synthetic construct
  misc_feature 1..35: note = Synthetic oligonucleotide
  source 1..35: mol_type = other DNA
gttgtaactcaacacatcaaagatacattttgtaa

SEQ ID NO: 27823 - DNA, 36 bp, synthetic construct
  misc_feature 1..36: note = Synthetic oligonucleotide
  source 1..36: mol_type = other DNA
gttgtaactgactgatgcctgcccgcaaaccacaac

SEQ ID NO: 27824 - DNA, 36 bp, synthetic construct
  misc_feature 1..36: note = Synthetic oligonucleotide
  source 1..36: mol_type = other DNA
gttgtaagttcggggcaggctccagtctgatacaat

SEQ ID NO: 27825 - DNA, 30 bp, synthetic construct
  misc_feature 1..30: note = Synthetic oligonucleotide
  source 1..30: mol_type = other DNA
gttgtaagttgctttcaaattcgtaacttt

SEQ ID NO: 27826 - DNA, 38 bp, synthetic construct
  misc_feature 1..38: note = Synthetic oligonucleotide
  source 1..38: mol_type = other DNA
gttgtaatcactgttttaaaagtagaaaaatctgaaag

SEQ ID NO: 27827 - DNA, 31 bp, synthetic construct
  misc_feature 1..31: note = Synthetic oligonucleotide
  source 1..31: mol_type = other DNA
gttgtaatctatccacaaatgtaaaagaact

SEQ ID NO: 27828 - DNA, 30 bp, synthetic construct
  misc_feature 1..30: note = Synthetic oligonucleotide
  source 1..30: mol_type = other DNA
gttgtaattagctttcaatttaagcaactt

SEQ ID NO: 27829 - DNA, 32 bp, synthetic construct
  misc_feature 1..32: note = Synthetic oligonucleotide
  source 1..32: mol_type = other DNA
gttgtaattagctttcaatttaagtaacttta

SEQ ID NO: 27830 - DNA, 36 bp, synthetic construct
  misc_feature 1..36: note = Synthetic oligonucleotide
  source 1..36: mol_type = other DNA
gttgtaattcattctatttctacatcaaaccacaac

SEQ ID NO: 27831 - DNA, 36 bp, synthetic construct; identical to SEQ ID NO: 27830
  misc_feature 1..36: note = Synthetic oligonucleotide
  source 1..36: mol_type = other DNA

SEQ ID NO: 27832 - DNA, 36 bp, synthetic construct; identical to SEQ ID NO: 27830
  misc_feature 1..36: note = Synthetic oligonucleotide
  source 1..36: mol_type = other DNA

SEQ ID NO: 27833 - DNA, 36 bp, synthetic construct; identical to SEQ ID NO: 27830
  misc_feature 1..36: note = Synthetic oligonucleotide
  source 1..36: mol_type = other DNA

SEQ ID NO: 27834 - DNA, 36 bp, synthetic construct; identical to SEQ ID NO: 27830
  misc_feature 1..36: note = Synthetic oligonucleotide
  source 1..36: mol_type = other DNA

SEQ ID NO: 27835 - DNA, 36 bp, synthetic construct; identical to SEQ ID NO: 27830
  misc_feature 1..36: note = Synthetic oligonucleotide
  source 1..36: mol_type = other DNA

SEQ ID NO: 27836 - DNA, 36 bp, synthetic construct
  misc_feature 1..36: note = Synthetic oligonucleotide
  source 1..36: mol_type = other DNA
gttgtaattccctactatctctcgctaaagtataat

SEQ ID NO: 27837 - DNA, 36 bp, synthetic construct
  misc_feature 1..36: note = Synthetic oligonucleotide
  source 1..36: mol_type = other DNA
gttgtaattccctactatctctcgctaaggtataat

SEQ ID NO: 27838 - DNA, 36 bp, synthetic construct; identical to SEQ ID NO: 27837
  misc_feature 1..36: note = Synthetic oligonucleotide
  source 1..36: mol_type = other DNA

SEQ ID NO: 27839 - DNA, 36 bp, synthetic construct; identical to SEQ ID NO: 27837
  misc_feature 1..36: note = Synthetic oligonucleotide
  source 1..36: mol_type = other DNA

SEQ ID NO: 27840 - DNA, 36 bp, synthetic construct; identical to SEQ ID NO: 27837
  misc_feature 1..36: note = Synthetic oligonucleotide
  source 1..36: mol_type = other DNA

SEQ ID NO: 27841 - DNA, 36 bp, synthetic construct; identical to SEQ ID NO: 27837
  misc_feature 1..36: note = Synthetic oligonucleotide
  source 1..36: mol_type = other DNA

SEQ ID NO: 27842 - DNA, 36 bp, synthetic construct; identical to SEQ ID NO: 27837
  misc_feature 1..36: note = Synthetic oligonucleotide
  source 1..36: mol_type = other DNA

SEQ ID NO: 27843 - DNA, 36 bp, synthetic construct; identical to SEQ ID NO: 27837
  misc_feature 1..36: note = Synthetic oligonucleotide
  source 1..36: mol_type = other DNA

SEQ ID NO: 27844 - DNA, 36 bp, synthetic construct; identical to SEQ ID NO: 27837
  misc_feature 1..36: note = Synthetic oligonucleotide
  source 1..36: mol_type = other DNA

SEQ ID NO: 27845 - DNA, 36 bp, synthetic construct
  misc_feature 1..36: note = Synthetic oligonucleotide
  source 1..36: mol_type = other DNA
gttgtaattccctgatatttctcgctatggtacaat

SEQ ID NO: 27846 - DNA, 23 bp, synthetic construct
  misc_feature 1..23: note = Synthetic oligonucleotide
  source 1..23: mol_type = other DNA
gttgtaattccctgttatcactt

SEQ ID NO: 27847 - DNA, 36 bp, synthetic construct
  misc_feature 1..36: note = Synthetic oligonucleotide
  source 1..36: mol_type = other DNA
gttgtaattccctgttatcacttggtatgatataat

SEQ ID NO: 27848 - DNA, 36 bp, synthetic construct; identical to SEQ ID NO: 13020
  misc_feature 1..36: note = Synthetic oligonucleotide
  source 1..36: mol_type = other DNA

SEQ ID NO: 27849 - DNA, 36 bp, synthetic construct; identical to SEQ ID NO: 13020
  misc_feature 1..36: note = Synthetic oligonucleotide
  source 1..36: mol_type = other DNA

SEQ ID NO: 27850 - DNA, 36 bp, synthetic construct; identical to SEQ ID NO: 13020
  misc_feature 1..36: note = Synthetic oligonucleotide
  source 1..36: mol_type = other DNA

SEQ ID NO: 27851 - DNA, 36 bp, synthetic construct; identical to SEQ ID NO: 13020
  misc_feature 1..36: note = Synthetic oligonucleotide
  source 1..36: mol_type = other DNA

SEQ ID NO: 27852 - DNA, 36 bp, synthetic construct; identical to SEQ ID NO: 13020
  misc_feature 1..36: note = Synthetic oligonucleotide
  source 1..36: mol_type = other DNA

SEQ ID NO: 27853 - DNA, 36 bp, synthetic construct; identical to SEQ ID NO: 13020
  misc_feature 1..36: note = Synthetic oligonucleotide
  source 1..36: mol_type = other DNA

SEQ ID NO: 27854 - DNA, 36 bp, synthetic construct; identical to SEQ ID NO: 13020
  misc_feature 1..36: note = Synthetic oligonucleotide
  source 1..36: mol_type = other DNA

SEQ ID NO: 27855 - DNA, 36 bp, synthetic construct; identical to SEQ ID NO: 13020
  misc_feature 1..36: note = Synthetic oligonucleotide
  source 1..36: mol_type = other DNA

SEQ ID NO: 27856 - DNA, 36 bp, synthetic construct; identical to SEQ ID NO: 13020
  misc_feature 1..36: note = Synthetic oligonucleotide
  source 1..36: mol_type = other DNA

SEQ ID NO: 27857 - DNA, 36 bp, synthetic construct; identical to SEQ ID NO: 13020
  misc_feature 1..36: note = Synthetic oligonucleotide
  source 1..36: mol_type = other DNA

SEQ ID NO: 27858 - DNA, 36 bp, synthetic construct; identical to SEQ ID NO: 13020
  misc_feature 1..36: note = Synthetic oligonucleotide
  source 1..36: mol_type = other DNA

SEQ ID NO: 27859 - DNA, 36 bp, synthetic construct; identical to SEQ ID NO: 13020
  misc_feature 1..36: note = Synthetic oligonucleotide
  source 1..36: mol_type = other DNA

SEQ ID NO: 27860 - DNA, 36 bp, synthetic construct; identical to SEQ ID NO: 13020
  misc_feature 1..36: note = Synthetic oligonucleotide
  source 1..36: mol_type = other DNA

SEQ ID NO: 27861 - DNA, 36 bp, synthetic construct; identical to SEQ ID NO: 13020
  misc_feature 1..36: note = Synthetic oligonucleotide
  source 1..36: mol_type = other DNA

SEQ ID NO: 27862 - DNA, 36 bp, synthetic construct
  misc_feature 1..36: note = Synthetic oligonucleotide
  source 1..36: mol_type = other DNA
gttgtaattctttctatttctacatcaaaccacaac

SEQ ID NO: 27863 - DNA, 31 bp, synthetic construct
  misc_feature 1..31: note = Synthetic oligonucleotide
  source 1..31: mol_type = other DNA
gttgtaattgacaccacaaagatacaacttt

SEQ ID NO: 27864 - DNA, 36 bp, synthetic construct
  misc_feature 1..36: note = Synthetic oligonucleotide
  source 1..36: mol_type = other DNA
gttgtacagttacttaaatcttgaaagtacaaaaac

SEQ ID NO: 27865 - DNA, 36 bp, synthetic construct; identical to SEQ ID NO: 13024
  misc_feature 1..36: note = Synthetic oligonucleotide
  source 1..36: mol_type = other DNA

SEQ ID NO: 27866 - DNA, 36 bp, synthetic construct; identical to SEQ ID NO: 13024
  misc_feature 1..36: note = Synthetic oligonucleotide
  source 1..36: mol_type = other DNA

SEQ ID NO: 27867 - DNA, 36 bp, synthetic construct; identical to SEQ ID NO: 13024
  misc_feature 1..36: note = Synthetic oligonucleotide
  source 1..36: mol_type = other DNA

SEQ ID NO: 27868 - DNA, 36 bp, synthetic construct; identical to SEQ ID NO: 13024
  misc_feature 1..36: note = Synthetic oligonucleotide
  source 1..36: mol_type = other DNA

SEQ ID NO: 27869 - DNA, 36 bp, synthetic construct; identical to SEQ ID NO: 13024
  misc_feature 1..36: note = Synthetic oligonucleotide
  source 1..36: mol_type = other DNA

SEQ ID NO: 27870 - DNA, 36 bp, synthetic construct; identical to SEQ ID NO: 13024
  misc_feature 1..36: note = Synthetic oligonucleotide
  source 1..36: mol_type = other DNA

SEQ ID NO: 27871 - DNA, 36 bp, synthetic construct; identical to SEQ ID NO: 13024
  misc_feature 1..36: note = Synthetic oligonucleotide
  source 1..36: mol_type = other DNA

SEQ ID NO: 27872 - DNA, 36 bp, synthetic construct; identical to SEQ ID NO: 13024
  misc_feature 1..36: note = Synthetic oligonucleotide
  source 1..36: mol_type = other DNA

SEQ ID NO: 27873 - DNA, 36 bp, synthetic construct; identical to SEQ ID NO: 13024
  misc_feature 1..36: note = Synthetic oligonucleotide
  source 1..36: mol_type = other DNA

SEQ ID NO: 27874 - DNA, 36 bp, synthetic construct; identical to SEQ ID NO: 13024
  misc_feature 1..36: note = Synthetic oligonucleotide
  source 1..36: mol_type = other DNA

SEQ ID NO: 27875 - DNA, 36 bp, synthetic construct; identical to SEQ ID NO: 13024
  misc_feature 1..36: note = Synthetic oligonucleotide
  source 1..36: mol_type = other DNA

SEQ ID NO: 27876 - DNA, 36 bp, synthetic construct; identical to SEQ ID NO: 13024
  misc_feature 1..36: note = Synthetic oligonucleotide
  source 1..36: mol_type = other DNA

SEQ ID NO: 27877 - DNA, 36 bp, synthetic construct; identical to SEQ ID NO: 13024
  misc_feature 1..36: note = Synthetic oligonucleotide
  source 1..36: mol_type = other DNA

SEQ ID NO: 27878 - DNA, 36 bp, synthetic construct; identical to SEQ ID NO: 13024
  misc_feature 1..36: note = Synthetic oligonucleotide
  source 1..36: mol_type = other DNA

SEQ ID NO: 27879 - DNA, 36 bp, synthetic construct; identical to SEQ ID NO: 13024
  misc_feature 1..36: note = Synthetic oligonucleotide
  source 1..36: mol_type = other DNA

SEQ ID NO: 27880 - DNA, 36 bp, synthetic construct; identical to SEQ ID NO: 13024
  misc_feature 1..36: note = Synthetic oligonucleotide
  source 1..36: mol_type = other DNA

SEQ ID NO: 27881 - DNA, 36 bp, synthetic construct; identical to SEQ ID NO: 13024
  misc_feature 1..36: note = Synthetic oligonucleotide
  source 1..36: mol_type = other DNA

SEQ ID NO: 27882 - DNA, 36 bp, synthetic construct; identical to SEQ ID NO: 13024
  misc_feature 1..36: note = Synthetic oligonucleotide
  source 1..36: mol_type = other DNA

SEQ ID NO: 27883 - DNA, 36 bp, synthetic construct; identical to SEQ ID NO: 13024
  misc_feature 1..36: note = Synthetic oligonucleotide
  source 1..36: mol_type = other DNA

SEQ ID NO: 27884 - DNA, 36 bp, synthetic construct; identical to SEQ ID NO: 13024
  misc_feature 1..36: note = Synthetic oligonucleotide
  source 1..36: mol_type = other DNA

SEQ ID NO: 27885 - DNA, 36 bp, synthetic construct; identical to SEQ ID NO: 13024
  misc_feature 1..36: note = Synthetic oligonucleotide
  source 1..36: mol_type = other DNA

SEQ ID NO: 27886 - DNA, 36 bp, synthetic construct; identical to SEQ ID NO: 13024
  misc_feature 1..36: note = Synthetic oligonucleotide
  source 1..36: mol_type = other DNA

SEQ ID NO: 27887 - DNA, 36 bp, synthetic construct; identical to SEQ ID NO: 13024
  misc_feature 1..36: note = Synthetic oligonucleotide
  source 1..36: mol_type = other DNA

SEQ ID NO: 27888 - DNA, 36 bp, synthetic construct; identical to SEQ ID NO: 13024
  misc_feature 1..36: note = Synthetic oligonucleotide
  source 1..36: mol_type = other DNA

SEQ ID NO: 27889 - DNA, 36 bp, synthetic construct; identical to SEQ ID NO: 13024
  misc_feature 1..36: note = Synthetic oligonucleotide
  source 1..36: mol_type = other DNA

SEQ ID NO: 27890 - DNA, 36 bp, synthetic construct; identical to SEQ ID NO: 13024
  misc_feature 1..36: note = Synthetic oligonucleotide
  source 1..36: mol_type = other DNA

SEQ ID NO: 27891 - DNA, 36 bp, synthetic construct; identical to SEQ ID NO: 13024
  misc_feature 1..36: note = Synthetic oligonucleotide
  source 1..36: mol_type = other DNA

SEQ ID NO: 27892 - DNA, 36 bp, synthetic construct; identical to SEQ ID NO: 13024
  misc_feature 1..36: note = Synthetic oligonucleotide
  source 1..36: mol_type = other DNA

SEQ ID NO: 27893 - DNA, 36 bp, synthetic construct; identical to SEQ ID NO: 13024
  misc_feature 1..36: note = Synthetic oligonucleotide
  source 1..36: mol_type = other DNA

SEQ ID NO: 27894 - DNA, 36 bp, synthetic construct; identical to SEQ ID NO: 13024
  misc_feature 1..36: note = Synthetic oligonucleotide
  source 1..36: mol_type = other DNA

SEQ ID NO: 27895 - DNA, 36 bp, synthetic construct; identical to SEQ ID NO: 13024
  misc_feature 1..36: note = Synthetic oligonucleotide
  source 1..36: mol_type = other DNA

SEQ ID NO: 27896 - DNA, 36 bp, synthetic construct; identical to SEQ ID NO: 13024
  misc_feature 1..36: note = Synthetic oligonucleotide
  source 1..36: mol_type = other DNA

SEQ ID NO: 27897 - DNA, 36 bp, synthetic construct; identical to SEQ ID NO: 13024
  misc_feature 1..36: note = Synthetic oligonucleotide
  source 1..36: mol_type = other DNA

SEQ ID NO: 27898 - DNA, 36 bp, synthetic construct; identical to SEQ ID NO: 13024
  misc_feature 1..36: note = Synthetic oligonucleotide
  source 1..36: mol_type = other DNA

SEQ ID NO: 27899 - DNA, 36 bp, synthetic construct; identical to SEQ ID NO: 13024
  misc_feature 1..36: note = Synthetic oligonucleotide
  source 1..36: mol_type = other DNA

SEQ ID NO: 27900 - DNA, 36 bp, synthetic construct; identical to SEQ ID NO: 13024
  misc_feature 1..36: note = Synthetic oligonucleotide
  source 1..36: mol_type = other DNA

SEQ ID NO: 27901 - DNA, 36 bp, synthetic construct
  misc_feature 1..36: note = Synthetic oligonucleotide
  source 1..36: mol_type = other DNA
gttgtacagttacttaaattttgagagtacaaaaac

SEQ ID NO: 27902 - DNA, 36 bp, synthetic construct
  misc_feature 1..36: note = Synthetic oligonucleotide
  source 1..36: mol_type = other DNA
gttgtaccccaacggcgattccccgccagctacagc

SEQ ID NO: 27903 - DNA, 36 bp, synthetic construct; identical to SEQ ID NO: 27902
  misc_feature 1..36: note = Synthetic oligonucleotide
  source 1..36: mol_type = other DNA

SEQ ID NO: 27904 - DNA, 36 bp, synthetic construct
  misc_feature 1..36: note = Synthetic oligonucleotide
  source 1..36: mol_type = other DNA
gttgtacgtgctaatgcaaagatacacattttgaag

SEQ ID NO: 27905 - DNA, 28 bp, synthetic construct
  misc_feature 1..28: note = Synthetic oligonucleotide
  source 1..28: mol_type = other DNA
gttgtactagctattacgaaggtactga

SEQ ID NO: 27906 - DNA, 37 bp, synthetic construct
  misc_feature 1..37: note = Synthetic oligonucleotide
  source 1..37: mol_type = other DNA
gttgtactagctattacgaaggtactgaattgaaagc

SEQ ID NO: 27907 - DNA, 36 bp, synthetic construct
  misc_feature 1..36: note = Synthetic oligonucleotide
  source 1..36: mol_type = other DNA
gttgtactttgaggtaaatgaacggtaatctaaaat

SEQ ID NO: 27908 - DNA, 36 bp, synthetic construct; identical to SEQ ID NO: 13032
  misc_feature 1..36: note = Synthetic oligonucleotide
  source 1..36: mol_type = other DNA

SEQ ID NO: 27909 - DNA, 36 bp, synthetic construct
  misc_feature 1..36: note = Synthetic oligonucleotide
  source 1..36: mol_type = other DNA
gttgtagcaaaacgagaagcgaccgcaagcctcagc

SEQ ID NO: 27910 - DNA, 37 bp, synthetic construct
  misc_feature 1..37: note = Synthetic oligonucleotide
  source 1..37: mol_type = other DNA
gttgtagcaaaacgagaggcgaccgcaagcctcagca

SEQ ID NO: 27911 - DNA, 36 bp, synthetic construct
  misc_feature 1..36: note = Synthetic oligonucleotide
  source 1..36: mol_type = other DNA
gttgtagccagagcgcaattcccgatttgctacact

SEQ ID NO: 27912 - DNA, 36 bp, synthetic construct
  misc_feature 1..36: note = Synthetic oligonucleotide
  source 1..36: mol_type = other DNA
gttgtagcccccgctctcaccccggaacgctacaat

SEQ ID NO: 27913 - DNA, 36 bp, synthetic construct
  misc_feature 1..36: note = Synthetic oligonucleotide
  source 1..36: mol_type = other DNA
gttgtagcctagcaaaaatttcgatggtagcagaac

SEQ ID NO: 27914 - DNA, 36 bp, synthetic construct; identical to SEQ ID NO: 27913
  misc_feature 1..36: note = Synthetic oligonucleotide
  source 1..36: mol_type = other DNA

SEQ ID NO: 27915 - DNA, 36 bp, synthetic construct; identical to SEQ ID NO: 13040
  misc_feature 1..36: note = Synthetic oligonucleotide
  source 1..36: mol_type = other DNA

SEQ ID NO: 27916 - DNA, 36 bp, synthetic construct; identical to SEQ ID NO: 13040
  misc_feature 1..36: note = Synthetic oligonucleotide
  source 1..36: mol_type = other DNA

SEQ ID NO: 27917 - DNA, 36 bp, synthetic construct; identical to SEQ ID NO: 13040
  misc_feature 1..36: note = Synthetic oligonucleotide
  source 1..36: mol_type = other DNA

SEQ ID NO: 27918 - DNA, 36 bp, synthetic construct
  misc_feature 1..36: note = Synthetic oligonucleotide
  source 1..36: mol_type = other DNA
gttgtagctcccactctcaccccggattgctacaat

SEQ ID NO: 27919 - DNA, 36 bp, synthetic construct
  misc_feature 1..36: note = Synthetic oligonucleotide
  source 1..36: mol_type = other DNA
gttgtagctcccgctctcaccccggatagctacact

SEQ ID NO: 27920 - DNA, 37 bp, synthetic construct; identical to SEQ ID NO: 13045
  misc_feature 1..37: note = Synthetic oligonucleotide
  source 1..37: mol_type = other DNA

SEQ ID NO: 27921 - DNA, 37 bp, synthetic construct; identical to SEQ ID NO: 13045
  misc_feature 1..37: note = Synthetic oligonucleotide
  source 1..37: mol_type = other DNA

SEQ ID NO: 27922 - DNA, 37 bp, synthetic construct
  misc_feature 1..37: note = Synthetic oligonucleotide
  source 1..37: mol_type = other DNA
gttgtagctcccgttctcaccccggatgcctacactc

SEQ ID NO: 27923 - DNA, 36 bp, synthetic construct
  misc_feature 1..36: note = Synthetic oligonucleotide
  source 1..36: mol_type = other DNA
gttgtagctccctaacagttcttggtacgaaataat

SEQ ID NO: 27924 - DNA, 37 bp, synthetic construct
  misc_feature 1..37: note = Synthetic oligonucleotide
  source 1..37: mol_type = other DNA
gttgtagctccctctctcaccccgaatggcttataat

SEQ ID NO: 27925 - DNA, 36 bp, synthetic construct
  misc_feature 1..36: note = Synthetic oligonucleotide
  source 1..36: mol_type = other DNA
gttgtagctccctctctcaccccgattggctacaat

SEQ ID NO: 27926 - DNA, 36 bp, synthetic construct; identical to SEQ ID NO: 27925
  misc_feature 1..36: note = Synthetic oligonucleotide
  source 1..36: mol_type = other DNA

SEQ ID NO: 27927 - DNA, 36 bp, synthetic construct; identical to SEQ ID NO: 27925
  misc_feature 1..36: note = Synthetic oligonucleotide
  source 1..36: mol_type = other DNA

SEQ ID NO: 27928 - DNA, 36 bp, synthetic construct; identical to SEQ ID NO: 13047
  misc_feature 1..36: note = Synthetic oligonucleotide
  source 1..36: mol_type = other DNA

SEQ ID NO: 27929 - DNA, 36 bp, synthetic construct; identical to SEQ ID NO: 13047
  misc_feature 1..36: note = Synthetic oligonucleotide
  source 1..36: mol_type = other DNA

SEQ ID NO: 27930 - DNA, 36 bp, synthetic construct; identical to SEQ ID NO: 13047
  misc_feature 1..36: note = Synthetic oligonucleotide
  source 1..36: mol_type = other DNA

SEQ ID NO: 27931 - DNA, 36 bp, synthetic construct; identical to SEQ ID NO: 13047
  misc_feature 1..36: note = Synthetic oligonucleotide
  source 1..36: mol_type = other DNA

SEQ ID NO: 27932 - DNA, 36 bp, synthetic construct; identical to SEQ ID NO: 13047
  misc_feature 1..36: note = Synthetic oligonucleotide
  source 1..36: mol_type = other DNA

SEQ ID NO: 27933 - DNA, 36 bp, synthetic construct; identical to SEQ ID NO: 13047
  misc_feature 1..36: note = Synthetic oligonucleotide
  source 1..36: mol_type = other DNA

SEQ ID NO: 27934 - DNA, 37 bp, synthetic construct; identical to SEQ ID NO: 13050
  misc_feature 1..37: note = Synthetic oligonucleotide
  source 1..37: mol_type = other DNA

SEQ ID NO: 27935 - DNA, 36 bp, synthetic construct
  misc_feature 1..36: note = Synthetic oligonucleotide
  source 1..36: mol_type = other DNA
gttgtagctccctctctcaccccggaagcctacaat

SEQ ID NO: 27936 - DNA, 36 bp, synthetic construct; identical to SEQ ID NO: 13051
  misc_feature 1..36: note = Synthetic oligonucleotide
  source 1..36: mol_type = other DNA

SEQ ID NO: 27937 - DNA, 36 bp, synthetic construct; identical to SEQ ID NO: 13051
  misc_feature 1..36: note = Synthetic oligonucleotide
  source 1..36: mol_type = other DNA

SEQ ID NO: 27938 - DNA, 36 bp, synthetic construct; identical to SEQ ID NO: 13051
  misc_feature 1..36: note = Synthetic oligonucleotide
  source 1..36: mol_type = other DNA

SEQ ID NO: 27939 - DNA, 36 bp, synthetic construct; identical to SEQ ID NO: 13051
  misc_feature 1..36: note = Synthetic oligonucleotide
  source 1..36: mol_type = other DNA

SEQ ID NO: 27940 - DNA, 36 bp, synthetic construct; identical to SEQ ID NO: 13051
  misc_feature 1..36: note = Synthetic oligonucleotide
  source 1..36: mol_type = other DNA

SEQ ID NO: 27941 - DNA, 36 bp, synthetic construct; identical to SEQ ID NO: 13051
  misc_feature 1..36: note = Synthetic oligonucleotide
  source 1..36: mol_type = other DNA

SEQ ID NO: 27942 - DNA, 36 bp, synthetic construct; identical to SEQ ID NO: 13051
  misc_feature 1..36: note = Synthetic oligonucleotide
  source 1..36: mol_type = other DNA

SEQ ID NO: 27943 - DNA, 37 bp, synthetic construct; identical to SEQ ID NO: 13052
  misc_feature 1..37: note = Synthetic oligonucleotide
  source 1..37: mol_type = other DNA

SEQ ID NO: 27944 - DNA, 37 bp, synthetic construct; identical to SEQ ID NO: 13052
  misc_feature 1..37: note = Synthetic oligonucleotide
  source 1..37: mol_type = other DNA

SEQ ID NO: 27945 - DNA, 37 bp, synthetic construct; identical to SEQ ID NO: 13052
  misc_feature 1..37: note = Synthetic oligonucleotide
  source 1..37: mol_type = other DNA

SEQ ID NO: 27946 - DNA, 37 bp, synthetic construct
  misc_feature 1..37: note = Synthetic oligonucleotide
  source 1..37: mol_type = other DNA
gttgtagctccctctctcaccccggaaggctacaatt

SEQ ID NO: 27947 - DNA, 36 bp, synthetic construct; identical to SEQ ID NO: 13054
  misc_feature 1..36: note = Synthetic oligonucleotide
  source 1..36: mol_type = other DNA

SEQ ID NO: 27948 - DNA, 36 bp, synthetic construct; identical to SEQ ID NO: 13055
  misc_feature 1..36: note = Synthetic oligonucleotide
  source 1..36: mol_type = other DNA

SEQ ID NO: 27949 - DNA, 36 bp, synthetic construct; identical to SEQ ID NO: 13055
  misc_feature 1..36: note = Synthetic oligonucleotide
  source 1..36: mol_type = other DNA

SEQ ID NO: 27950 - DNA, 37 bp, synthetic construct; identical to SEQ ID NO: 13056
  misc_feature 1..37: note = Synthetic oligonucleotide
  source 1..37: mol_type = other DNA

SEQ ID NO: 27951 - DNA, 37 bp, synthetic construct; identical to SEQ ID NO: 13056
  misc_feature 1..37: note = Synthetic oligonucleotide
  source 1..37: mol_type = other DNA

SEQ ID NO: 27952 - DNA, 36 bp, synthetic construct; identical to SEQ ID NO: 13058
  misc_feature 1..36: note = Synthetic oligonucleotide
  source 1..36: mol_type = other DNA

SEQ ID NO: 27953 - DNA, 36 bp, synthetic construct; identical to SEQ ID NO: 13058
  misc_feature 1..36: note = Synthetic oligonucleotide
  source 1..36: mol_type = other DNA

SEQ ID NO: 27954 - DNA, 37 bp, synthetic construct; identical to SEQ ID NO: 13059
  misc_feature 1..37: note = Synthetic oligonucleotide
  source 1..37: mol_type = other DNA

SEQ ID NO: 27955 - DNA, 37 bp, synthetic construct; identical to SEQ ID NO: 13059
  misc_feature 1..37: note = Synthetic oligonucleotide
  source 1..37: mol_type = other DNA

SEQ ID NO: 27956 - DNA, 37 bp, synthetic construct; identical to SEQ ID NO: 13062
  misc_feature 1..37: note = Synthetic oligonucleotide
  source 1..37: mol_type = other DNA

SEQ ID NO: 27957 - DNA, 37 bp, synthetic construct; identical to SEQ ID NO: 13063
  misc_feature 1..37: note = Synthetic oligonucleotide
  source 1..37: mol_type = other DNA

SEQ ID NO: 27958 - DNA, 37 bp, synthetic construct; identical to SEQ ID NO: 13064
  misc_feature 1..37: note = Synthetic oligonucleotide
  source 1..37: mol_type = other DNA

SEQ ID NO: 27959 - DNA, 37 bp, synthetic construct; identical to SEQ ID NO: 13064
  misc_feature 1..37: note = Synthetic oligonucleotide
  source 1..37: mol_type = other DNA

SEQ ID NO: 27960 - DNA, 37 bp, synthetic construct; identical to SEQ ID NO: 13065
  misc_feature 1..37: note = Synthetic oligonucleotide
  source 1..37: mol_type = other DNA

SEQ ID NO: 27961 - DNA, 37 bp, synthetic construct; identical to SEQ ID NO: 13065
  misc_feature 1..37: note = Synthetic oligonucleotide
  source 1..37: mol_type = other DNA

SEQ ID NO: 27962 - DNA, 37 bp, synthetic construct
  misc_feature 1..37: note = Synthetic oligonucleotide
  source 1..37: mol_type = other DNA
gttgtagctccctctctcaccccggatgcactacaat

SEQ ID NO: 27963 - DNA, 37 bp, synthetic construct; identical to SEQ ID NO: 27962
  misc_feature 1..37: note = Synthetic oligonucleotide
  source 1..37: mol_type = other DNA

SEQ ID NO: 27964 - DNA, 36 bp, synthetic construct
  misc_feature 1..36: note = Synthetic oligonucleotide
  source 1..36: mol_type = other DNA
gttgtagctccctctctcaccccggatgcctacaat

SEQ ID NO: 27965 - DNA, 37 bp, synthetic construct; identical to SEQ ID NO: 13067
  misc_feature 1..37: note = Synthetic oligonucleotide
  source 1..37: mol_type = other DNA

SEQ ID NO: 27966 - DNA, 36 bp, synthetic construct
  misc_feature 1..36: note = Synthetic oligonucleotide
  source 1..36: mol_type = other DNA
gttgtagctccctctctcaccccggatggctacact

SEQ ID NO: 27967 - DNA, 37 bp, synthetic construct
  misc_feature 1..37: note = Synthetic oligonucleotide
  source 1..37: mol_type = other DNA
gttgtagctccctctctcaccccggattgctacactc

SEQ ID NO: 27968 - DNA, 36 bp, synthetic construct; identical to SEQ ID NO: 13070
  misc_feature 1..36: note = Synthetic oligonucleotide
  source 1..36: mol_type = other DNA

SEQ ID NO: 27969 - DNA, 36 bp, synthetic construct
  misc_feature 1..36: note = Synthetic oligonucleotide
  source 1..36: mol_type = other DNA
gttgtagctccctgatggttcaaggtatggtattat

SEQ ID NO: 27970 - DNA, 36 bp, synthetic construct
  misc_feature 1..36: note = Synthetic oligonucleotide
  source 1..36: mol_type = other DNA
gttgtagctccctgatggttcaaggtatggtattgt

SEQ ID NO: 27971 - DNA, 36 bp, synthetic construct; identical to SEQ ID NO: 13071
  misc_feature 1..36: note = Synthetic oligonucleotide
  source 1..36: mol_type = other DNA

SEQ ID NO: 27972 - DNA, 36 bp, synthetic construct; identical to SEQ ID NO: 13072
  misc_feature 1..36: note = Synthetic oligonucleotide
  source 1..36: mol_type = other DNA

SEQ ID NO: 27973 - DNA, 36 bp, synthetic construct; identical to SEQ ID NO: 13072
  misc_feature 1..36: note = Synthetic oligonucleotide
  source 1..36: mol_type = other DNA

SEQ ID NO: 27974 - DNA, 36 bp, synthetic construct; identical to SEQ ID NO: 13072
  misc_feature 1..36: note = Synthetic oligonucleotide
  source 1..36: mol_type = other DNA

SEQ ID NO: 27975 - DNA, 36 bp, synthetic construct; identical to SEQ ID NO: 13072
  misc_feature 1..36: note = Synthetic oligonucleotide
  source 1..36: mol_type = other DNA

SEQ ID NO: 27976 - DNA, 36 bp, synthetic construct; identical to SEQ ID NO: 13072
  misc_feature 1..36: note = Synthetic oligonucleotide
  source 1..36: mol_type = other DNA

SEQ ID NO: 27977 - DNA, 36 bp, synthetic construct; identical to SEQ ID NO: 13072
  misc_feature 1..36: note = Synthetic oligonucleotide
  source 1..36: mol_type = other DNA

SEQ ID NO: 27978 - DNA, 36 bp, synthetic construct; identical to SEQ ID NO: 13072
  misc_feature 1..36: note = Synthetic oligonucleotide
  source 1..36: mol_type = other DNA

SEQ ID NO: 27979 - DNA, 36 bp, synthetic construct; identical to SEQ ID NO: 13072
  misc_feature 1..36: note = Synthetic oligonucleotide
  source 1..36: mol_type = other DNA

SEQ ID NO: 27980 - DNA, 36 bp, synthetic construct; identical to SEQ ID NO: 13072
  misc_feature 1..36: note = Synthetic oligonucleotide
  source 1..36: mol_type = other DNA

SEQ ID NO: 27981 - DNA, 36 bp, synthetic construct; identical to SEQ ID NO: 13072
  misc_feature 1..36: note = Synthetic oligonucleotide
  source 1..36: mol_type = other DNA

SEQ ID NO: 27982 - DNA, 36 bp, synthetic construct; identical to SEQ ID NO: 13072
  misc_feature 1..36: note = Synthetic oligonucleotide
  source 1..36: mol_type = other DNA

SEQ ID NO: 27983 - DNA, 36 bp, synthetic construct; identical to SEQ ID NO: 13072
  misc_feature 1..36: note = Synthetic oligonucleotide
  source 1..36: mol_type = other DNA

SEQ ID NO: 27984 - DNA, 36 bp, synthetic construct; identical to SEQ ID NO: 13072
  misc_feature 1..36: note = Synthetic oligonucleotide
  source 1..36: mol_type = other DNA

SEQ ID NO: 27985 - DNA, 36 bp, synthetic construct; identical to SEQ ID NO: 13072
  misc_feature 1..36: note = Synthetic oligonucleotide
  source 1..36: mol_type = other DNA

SEQ ID NO: 27986 - DNA, 36 bp, synthetic construct; identical to SEQ ID NO: 13072
  misc_feature 1..36: note = Synthetic oligonucleotide
  source 1..36: mol_type = other DNA

SEQ ID NO: 27987 - DNA, 36 bp, synthetic construct; identical to SEQ ID NO: 13072
  misc_feature 1..36: note = Synthetic oligonucleotide
  source 1..36: mol_type = other DNA

SEQ ID NO: 27988 - DNA, 36 bp, synthetic construct; identical to SEQ ID NO: 13072
  misc_feature 1..36: note = Synthetic oligonucleotide
  source 1..36: mol_type = other DNA

SEQ ID NO: 27989 - DNA, 36 bp, synthetic construct; identical to SEQ ID NO: 13072
  misc_feature 1..36: note = Synthetic oligonucleotide
  source 1..36: mol_type = other DNA

SEQ ID NO: 27990 - DNA, 36 bp, synthetic construct; identical to SEQ ID NO: 13072
  misc_feature 1..36: note = Synthetic oligonucleotide
  source 1..36: mol_type = other DNA

SEQ ID NO: 27991 - DNA, 36 bp, synthetic construct; identical to SEQ ID NO: 13072
  misc_feature 1..36: note = Synthetic oligonucleotide
  source 1..36: mol_type = other DNA

SEQ ID NO: 27992 - DNA, 36 bp, synthetic construct; identical to SEQ ID NO: 13072
  misc_feature 1..36: note = Synthetic oligonucleotide
  source 1..36: mol_type = other DNA

SEQ ID NO: 27993 - DNA, 36 bp, synthetic construct; identical to SEQ ID NO: 13072
  misc_feature 1..36: note = Synthetic oligonucleotide
  source 1..36: mol_type = other DNA

SEQ ID NO: 27994 - DNA, 36 bp, synthetic construct; identical to SEQ ID NO: 13072
  misc_feature 1..36: note = Synthetic oligonucleotide
  source 1..36: mol_type = other DNA

SEQ ID NO: 27995 - DNA, 36 bp, synthetic construct; identical to SEQ ID NO: 13072
  misc_feature 1..36: note = Synthetic oligonucleotide
  source 1..36: mol_type = other DNA

SEQ ID NO: 27996 - DNA, 36 bp, synthetic construct; identical to SEQ ID NO: 13072
  misc_feature 1..36: note = Synthetic oligonucleotide
  source 1..36: mol_type = other DNA

SEQ ID NO: 27997 - DNA, 36 bp, synthetic construct; identical to SEQ ID NO: 13072
  misc_feature 1..36: note = Synthetic oligonucleotide
  source 1..36: mol_type = other DNA

SEQ ID NO: 27998 - DNA, 36 bp, synthetic construct; identical to SEQ ID NO: 13072
  misc_feature 1..36: note = Synthetic oligonucleotide
  source 1..36: mol_type = other DNA

SEQ ID NO: 27999 - DNA, 37 bp, synthetic construct
  misc_feature 1..37: note = Synthetic oligonucleotide
  source 1..37: mol_type = other DNA
gttgtagctccctttctcatttcgcagtgctacaata

SEQ ID NO: 28000 - DNA, 36 bp, synthetic construct; identical to SEQ ID NO: 13073
  misc_feature 1..36: note = Synthetic oligonucleotide
  source 1..36: mol_type = other DNA

SEQ ID NO: 28001 - DNA, 36 bp, synthetic construct; identical to SEQ ID NO: 13073
  misc_feature 1..36: note = Synthetic oligonucleotide
  source 1..36: mol_type = other DNA

SEQ ID NO: 28002 - DNA, 36 bp, synthetic construct; identical to SEQ ID NO: 13073
  misc_feature 1..36: note = Synthetic oligonucleotide
  source 1..36: mol_type = other DNA

SEQ ID NO: 28003 - DNA, 36 bp, synthetic construct; identical to SEQ ID NO: 13073
  misc_feature 1..36: note = Synthetic oligonucleotide
  source 1..36: mol_type = other DNA

SEQ ID NO: 28004 - DNA, 36 bp, synthetic construct; identical to SEQ ID NO: 13073
  misc_feature 1..36: note = Synthetic oligonucleotide
  source 1..36: mol_type = other DNA

SEQ ID NO: 28005 - DNA, 36 bp, synthetic construct; identical to SEQ ID NO: 13073
  misc_feature 1..36: note = Synthetic oligonucleotide
  source 1..36: mol_type = other DNA

SEQ ID NO: 28006 - DNA, 36 bp, synthetic construct; identical to SEQ ID NO: 13073
  misc_feature 1..36: note = Synthetic oligonucleotide
  source 1..36: mol_type = other DNA

SEQ ID NO: 28007 - DNA, 36 bp, synthetic construct; identical to SEQ ID NO: 13073
  misc_feature 1..36: note = Synthetic oligonucleotide
  source 1..36: mol_type = other DNA

SEQ ID NO: 28008 - DNA, 36 bp, synthetic construct; identical to SEQ ID NO: 13073
  misc_feature 1..36: note = Synthetic oligonucleotide
  source 1..36: mol_type = other DNA

SEQ ID NO: 28009 - DNA, 36 bp, synthetic construct; identical to SEQ ID NO: 13073
  misc_feature 1..36: note = Synthetic oligonucleotide
  source 1..36: mol_type = other DNA

SEQ ID NO: 28010 - DNA, 36 bp, synthetic construct; identical to SEQ ID NO: 13073
  misc_feature 1..36: note = Synthetic oligonucleotide
  source 1..36: mol_type = other DNA

SEQ ID NO: 28011 - DNA, 36 bp, synthetic construct; identical to SEQ ID NO: 13073
  misc_feature 1..36: note = Synthetic oligonucleotide
  source 1..36: mol_type = other DNA

SEQ ID NO: 28012 - DNA, 36 bp, synthetic construct
  misc_feature 1..36: note = Synthetic oligonucleotide
  source 1..36: mol_type = other DNA
gttgtagctccttttttcatttcgcagtgctataat

SEQ ID NO: 28013 - DNA, 36 bp, synthetic construct
  misc_feature 1..36: note = Synthetic oligonucleotide
  source 1..36: mol_type = other DNA
gttgtagctctctttctcatttcgcagtgctacaat

SEQ ID NO: 28014 - DNA, 36 bp, synthetic construct
  misc_feature 1..36: note = Synthetic oligonucleotide
  source 1..36: mol_type = other DNA
gttgtagcttcctctcttatctcgtagtgttacaat

SEQ ID NO: 28015 - DNA, 36 bp, synthetic construct; identical to SEQ ID NO: 28014
  misc_feature 1..36: note = Synthetic oligonucleotide
  source 1..36: mol_type = other DNA

SEQ ID NO: 28016 - DNA, 36 bp, synthetic construct; identical to SEQ ID NO: 28014
  misc_feature 1..36: note = Synthetic oligonucleotide
  source 1..36: mol_type = other DNA

SEQ ID NO: 28017 - DNA, 37 bp, synthetic construct
  misc_feature 1..37: note = Synthetic oligonucleotide
  source 1..37: mol_type = other DNA
gttgtagcttcctctcttatctcgtagtgttacaatc

SEQ ID NO: 28018 - DNA, 36 bp, synthetic construct
  misc_feature 1..36: note = Synthetic oligonucleotide
  source 1..36: mol_type = other DNA
gttgtagtctagcaaaaatttcgatggtagcagaac

SEQ ID NO: 28019 - DNA, 36 bp, synthetic construct; identical to SEQ ID NO: 28018
  misc_feature 1..36: note = Synthetic oligonucleotide
  source 1..36: mol_type = other DNA

SEQ ID NO: 28020 - DNA, 36 bp, synthetic construct; identical to SEQ ID NO: 28018
  misc_feature 1..36: note = Synthetic oligonucleotide
  source 1..36: mol_type = other DNA

SEQ ID NO: 28021 - DNA, 36 bp, synthetic construct; identical to SEQ ID NO: 28018
  misc_feature 1..36: note = Synthetic oligonucleotide
  source 1..36: mol_type = other DNA

SEQ ID NO: 28022 - DNA, 36 bp, synthetic construct; identical to SEQ ID NO: 28018
  misc_feature 1..36: note = Synthetic oligonucleotide
  source 1..36: mol_type = other DNA

SEQ ID NO: 28023 - DNA, 36 bp, synthetic construct
  misc_feature 1..36: note = Synthetic oligonucleotide
  source 1..36: mol_type = other DNA
gttgtagttccccattttctcttgtagtggtataat

SEQ ID NO: 28024 - DNA, 36 bp, synthetic construct
  misc_feature 1..36: note = Synthetic oligonucleotide
  source 1..36: mol_type = other DNA
gttgtagttccccggtggttcttggtatggtataat

SEQ ID NO: 28025 - DNA, 36 bp, synthetic construct; identical to SEQ ID NO: 28024
  misc_feature 1..36: note = Synthetic oligonucleotide
  source 1..36: mol_type = other DNA

SEQ ID NO: 28026 - DNA, 36 bp, synthetic construct; identical to SEQ ID NO: 28024
  misc_feature 1..36: note = Synthetic oligonucleotide
  source 1..36: mol_type = other DNA

SEQ ID NO: 28027 - DNA, 36 bp, synthetic construct; identical to SEQ ID NO: 28024
  misc_feature 1..36: note = Synthetic oligonucleotide
  source 1..36: mol_type = other DNA

SEQ ID NO: 28028 - DNA, 36 bp, synthetic construct; identical to SEQ ID NO: 28024
  misc_feature 1..36: note = Synthetic oligonucleotide
  source 1..36: mol_type = other DNA

SEQ ID NO: 28029 - DNA, 36 bp, synthetic construct; identical to SEQ ID NO: 28024
  misc_feature 1..36: note = Synthetic oligonucleotide
  source 1..36: mol_type = other DNA

SEQ ID NO: 28030 - DNA, 36 bp, synthetic construct; identical to SEQ ID NO: 28024
  misc_feature 1..36: note = Synthetic oligonucleotide
  source 1..36: mol_type = other DNA

SEQ ID NO: 28031 - DNA, 36 bp, synthetic construct; identical to SEQ ID NO: 28024
  misc_feature 1..36: note = Synthetic oligonucleotide
  source 1..36: mol_type = other DNA

SEQ ID NO: 28032 - DNA, 36 bp, synthetic construct
  misc_feature 1..36: note = Synthetic oligonucleotide
  source 1..36: mol_type = other DNA
gttgtagttccccgttttttcttgtagcggtataat

SEQ ID NO: 28033 - DNA, 36 bp, synthetic construct
  misc_feature 1..36: note = Synthetic oligonucleotide
  source 1..36: mol_type = other DNA
gttgtagttcccctcagttttccggtgtgctataat

SEQ ID NO: 28034 - DNA, 36 bp, synthetic construct
  misc_feature 1..36: note = Synthetic oligonucleotide
  source 1..36: mol_type = other DNA
gttgtagttcccgctctcaccccggaacgctacaat

SEQ ID NO: 28035 - DNA, 36 bp, synthetic construct
  misc_feature 1..36: note = Synthetic oligonucleotide
  source 1..36: mol_type = other DNA
gttgtagttccctaacagttcttggtatggtataat

SEQ ID NO: 28036 - DNA, 36 bp, synthetic construct; identical to SEQ ID NO: 28035
  misc_feature 1..36: note = Synthetic oligonucleotide
  source 1..36: mol_type = other DNA

SEQ ID NO: 28037 - DNA, 36 bp, synthetic construct; identical to SEQ ID NO: 28035
  misc_feature 1..36: note = Synthetic oligonucleotide
  source 1..36: mol_type = other DNA

SEQ ID NO: 28038 - DNA, 36 bp, synthetic construct; identical to SEQ ID NO: 28035
  misc_feature 1..36: note = Synthetic oligonucleotide
  source 1..36: mol_type = other DNA

SEQ ID NO: 28039 - DNA, 36 bp, synthetic construct; identical to SEQ ID NO: 28035
  misc_feature 1..36: note = Synthetic oligonucleotide
  source 1..36: mol_type = other DNA

SEQ ID NO: 28040 - DNA, 36 bp, synthetic construct; identical to SEQ ID NO: 28035
  misc_feature 1..36: note = Synthetic oligonucleotide
  source 1..36: mol_type = other DNA

SEQ ID NO: 28041 - DNA, 36 bp, synthetic construct; identical to SEQ ID NO: 28035
  misc_feature 1..36: note = Synthetic oligonucleotide
  source 1..36: mol_type = other DNA

SEQ ID NO: 28042 - DNA, 36 bp, synthetic construct; identical to SEQ ID NO: 28035
  misc_feature 1..36: note = Synthetic oligonucleotide
  source 1..36: mol_type = other DNA

SEQ ID NO: 28043 - DNA, 36 bp, synthetic construct; identical to SEQ ID NO: 28035
  misc_feature 1..36: note = Synthetic oligonucleotide
  source 1..36: mol_type = other DNA

SEQ ID NO: 28044 - DNA, 36 bp, synthetic construct; identical to SEQ ID NO: 28035
  misc_feature 1..36: note = Synthetic oligonucleotide
  source 1..36: mol_type = other DNA

SEQ ID NO: 28045 - DNA, 36 bp, synthetic construct; identical to SEQ ID NO: 28035
  misc_feature 1..36: note = Synthetic oligonucleotide
  source 1..36: mol_type = other DNA

SEQ ID NO: 28046 - DNA, 36 bp, synthetic construct; identical to SEQ ID NO: 28035
  misc_feature 1..36: note = Synthetic oligonucleotide
  source 1..36: mol_type = other DNA

SEQ ID NO: 28047 - DNA, 36 bp, synthetic construct; identical to SEQ ID NO: 28035
  misc_feature 1..36: note = Synthetic oligonucleotide
  source 1..36: mol_type = other DNA

SEQ ID NO: 28048 - DNA, 36 bp, synthetic construct; identical to SEQ ID NO: 28035
  misc_feature 1..36: note = Synthetic oligonucleotide
  source 1..36: mol_type = other DNA

SEQ ID NO: 28049 - DNA, 36 bp, synthetic construct; identical to SEQ ID NO: 28035
  misc_feature 1..36: note = Synthetic oligonucleotide
  source 1..36: mol_type = other DNA

SEQ ID NO: 28050 - DNA, 36 bp, synthetic construct; identical to SEQ ID NO: 28035
  misc_feature 1..36: note = Synthetic oligonucleotide
  source 1..36: mol_type = other DNA

SEQ ID NO: 28051 - DNA, 36 bp, synthetic construct
  misc_feature 1..36: note = Synthetic oligonucleotide
  source 1..36: mol_type = other DNA
gttgtagttccctagcagttcttggtatggtaaaac

SEQ ID NO: 28052 - DNA, 36 bp, synthetic construct
  misc_feature 1..36: note = Synthetic oligonucleotide
  source 1..36: mol_type = other DNA
gttgtagttccctagcagttcttggtatggtaaatc

SEQ ID NO: 28053 - DNA, 36 bp, synthetic construct; identical to SEQ ID NO: 13082
  misc_feature 1..36: note = Synthetic oligonucleotide
  source 1..36: mol_type = other DNA

SEQ ID NO: 28054 - DNA, 36 bp, synthetic construct
  misc_feature 1..36: note = Synthetic oligonucleotide
  source 1..36: mol_type = other DNA
gttgtagttccctatttatttttggtatagtatagg

SEQ ID NO: 28055 - DNA, 36 bp, synthetic construct
  misc_feature 1..36: note = Synthetic oligonucleotide
  source 1..36: mol_type = other DNA
gttgtagttccctatttatttttggtatggtataat

SEQ ID NO: 28056 - DNA, 36 bp, synthetic construct; identical to SEQ ID NO: 28055
  misc_feature 1..36: note = Synthetic oligonucleotide
  source 1..36: mol_type = other DNA

SEQ ID NO: 28057 - DNA, 36 bp, synthetic construct
  misc_feature 1..36: note = Synthetic oligonucleotide
  source 1..36: mol_type = other DNA
gttgtagttccctctctcaccccggaaaactacaat

SEQ ID NO: 28058 - DNA, 36 bp, synthetic construct
  misc_feature 1..36: note = Synthetic oligonucleotide
  source 1..36: mol_type = other DNA
gttgtagttccctctctcaccccggatagctacaat

SEQ ID NO: 28059 - DNA, 36 bp, synthetic construct; identical to SEQ ID NO: 13086
  misc_feature 1..36: note = Synthetic oligonucleotide
  source 1..36: mol_type = other DNA

SEQ ID NO: 28060 - DNA, 36 bp, synthetic construct; identical to SEQ ID NO: 13087
  misc_feature 1..36: note = Synthetic oligonucleotide
  source 1..36: mol_type = other DNA

SEQ ID NO: 28061 - DNA, 36 bp, synthetic construct
  misc_feature 1..36: note = Synthetic oligonucleotide
  source 1..36: mol_type = other DNA
gttgtagttccctctctcaccccggttagctacaat

SEQ ID NO: 28062 - DNA, 36 bp, synthetic construct
  misc_feature 1..36: note = Synthetic oligonucleotide
  source 1..36: mol_type = other DNA
gttgtagttccctgacagttcttggtatggtataat

SEQ ID NO: 28063 - DNA, 36 bp, synthetic construct; identical to SEQ ID NO: 28062
  misc_feature 1..36: note = Synthetic oligonucleotide
  source 1..36: mol_type = other DNA

SEQ ID NO: 28064 - DNA, 36 bp, synthetic construct; identical to SEQ ID NO: 28062
  misc_feature 1..36: note = Synthetic oligonucleotide
  source 1..36: mol_type = other DNA

SEQ ID NO: 28065 - DNA, 36 bp, synthetic construct
  misc_feature 1..36: note = Synthetic oligonucleotide
  source 1..36: mol_type = other DNA
gttgtagttccctgatagttttttgtatggtataac

SEQ ID NO: 28066 - DNA, 36 bp, synthetic construct; identical to SEQ ID NO: 13094
  misc_feature 1..36: note = Synthetic oligonucleotide
  source 1..36: mol_type = other DNA

SEQ ID NO: 28067 - DNA, 36 bp, synthetic construct; identical to SEQ ID NO: 13095
  misc_feature 1..36: note = Synthetic oligonucleotide
  source 1..36: mol_type = other DNA

SEQ ID NO: 28068 - DNA, 36 bp, synthetic construct; identical to SEQ ID NO: 13095
  misc_feature 1..36: note = Synthetic oligonucleotide
  source 1..36: mol_type = other DNA

SEQ ID NO: 28069 - DNA, 36 bp, synthetic construct; identical to SEQ ID NO: 13095
  misc_feature 1..36: note = Synthetic oligonucleotide
  source 1..36: mol_type = other DNA

SEQ ID NO: 28070 - DNA, 36 bp, synthetic construct; identical to SEQ ID NO: 13097
  misc_feature 1..36: note = Synthetic oligonucleotide
  source 1..36: mol_type = other DNA

SEQ ID NO: 28071 - DNA, 36 bp, synthetic construct
  misc_feature 1..36: note = Synthetic oligonucleotide
  source 1..36: mol_type = other DNA
gttgtagttcccttaattctattggtataatataat

SEQ ID NO: 28072 - DNA, 36 bp, synthetic construct
  misc_feature 1..36: note = Synthetic oligonucleotide
  source 1..36: mol_type = other DNA
gttgtagttcccttattttctttggtatggtataat

SEQ ID NO: 28073 - DNA, 36 bp, synthetic construct
  misc_feature 1..36: note = Synthetic oligonucleotide
  source 1..36: mol_type = other DNA
gttgtagttcctcggtggttcttggtatggtataat

SEQ ID NO: 28074 - DNA, 36 bp, synthetic construct
  misc_feature 1..36: note = Synthetic oligonucleotide
  source 1..36: mol_type = other DNA
gttgtagttctctgatttttcttggtatgttataat

SEQ ID NO: 28075 - DNA, 36 bp, synthetic construct
  misc_feature 1..36: note = Synthetic oligonucleotide
  source 1..36: mol_type = other DNA
gttgtagttctctggtagttcttggtatggtataat

SEQ ID NO: 28076 - DNA, 37 bp, synthetic construct
  misc_feature 1..37: note = Synthetic oligonucleotide
  source 1..37: mol_type = other DNA
gttgtagttctctggtagttcttggtatggtataata

SEQ ID NO: 28077 - DNA, 36 bp, synthetic construct
  misc_feature 1..36: note = Synthetic oligonucleotide
  source 1..36: mol_type = other DNA
gttgtagttgcctgtctaaatcgatcctgctaactt

SEQ ID NO: 28078 - DNA, 36 bp, synthetic construct
  misc_feature 1..36: note = Synthetic oligonucleotide
  source 1..36: mol_type = other DNA
gttgtagtttgattaaagattagaaaaaacgatatt

SEQ ID NO: 28079 - DNA, 32 bp, synthetic construct
  misc_feature 1..32: note = Synthetic oligonucleotide
  source 1..32: mol_type = other DNA
gttgtataagagctaagctacataaaaatttg

SEQ ID NO: 28080 - DNA, 36 bp, synthetic construct
  misc_feature 1..36: note = Synthetic oligonucleotide
  source 1..36: mol_type = other DNA
gttgtataatattgaaaaactacatcaaaccacaac

SEQ ID NO: 28081 - DNA, 36 bp, synthetic construct
  misc_feature 1..36: note = Synthetic oligonucleotide
  source 1..36: mol_type = other DNA
gttgtatagtatccaatttctacatcaaatcacaac

SEQ ID NO: 28082 - DNA, 36 bp, synthetic construct; identical to SEQ ID NO: 28081
  misc_feature 1..36: note = Synthetic oligonucleotide
  source 1..36: mol_type = other DNA

SEQ ID NO: 28083 - DNA, 36 bp, synthetic construct; identical to SEQ ID NO: 28081
  misc_feature 1..36: note = Synthetic oligonucleotide
  source 1..36: mol_type = other DNA

SEQ ID NO: 28084 - DNA, 36 bp, synthetic construct; identical to SEQ ID NO: 28081
  misc_feature 1..36: note = Synthetic oligonucleotide
  source 1..36: mol_type = other DNA

SEQ ID NO: 28085 - DNA, 36 bp, synthetic construct; identical to SEQ ID NO: 28081
  misc_feature 1..36: note = Synthetic oligonucleotide
  source 1..36: mol_type = other DNA

SEQ ID NO: 28086 - DNA, 36 bp, synthetic construct; identical to SEQ ID NO: 28081
  misc_feature 1..36: note = Synthetic oligonucleotide
  source 1..36: mol_type = other DNA

SEQ ID NO: 28087 - DNA, 36 bp, synthetic construct; identical to SEQ ID NO: 28081
  misc_feature 1..36: note = Synthetic oligonucleotide
  source 1..36: mol_type = other DNA

SEQ ID NO: 28088 - DNA, 36 bp, synthetic construct; identical to SEQ ID NO: 28081
  misc_feature 1..36: note = Synthetic oligonucleotide
  source 1..36: mol_type = other DNA

SEQ ID NO: 28089 - DNA, 36 bp, synthetic construct; identical to SEQ ID NO: 28081
  misc_feature 1..36: note = Synthetic oligonucleotide
  source 1..36: mol_type = other DNA

SEQ ID NO: 28090 - DNA, 36 bp, synthetic construct; identical to SEQ ID NO: 28081
  misc_feature 1..36: note = Synthetic oligonucleotide
  source 1..36: mol_type = other DNA

SEQ ID NO: 28091 - DNA, 36 bp, synthetic construct; identical to SEQ ID NO: 28081
  misc_feature 1..36: note = Synthetic oligonucleotide
  source 1..36: mol_type = other DNA

SEQ ID NO: 28092 - DNA, 36 bp, synthetic construct; identical to SEQ ID NO: 28081
  misc_feature 1..36: note = Synthetic oligonucleotide
  source 1..36: mol_type = other DNA

SEQ ID NO: 28093 - DNA, 36 bp, synthetic construct; identical to SEQ ID NO: 28081
  misc_feature 1..36: note = Synthetic oligonucleotide
  source 1..36: mol_type = other DNA

SEQ ID NO: 28094 - DNA, 36 bp, synthetic construct; identical to SEQ ID NO: 28081
  misc_feature 1..36: note = Synthetic oligonucleotide
  source 1..36: mol_type = other DNA

SEQ ID NO: 28095 - DNA, 36 bp, synthetic construct
  misc_feature 1..36: note = Synthetic oligonucleotide
  source 1..36: mol_type = other DNA
gttgtatagtattcaatttctacatcaaatcacaac

SEQ ID NO: 28096 - DNA, 36 bp, synthetic construct; identical to SEQ ID NO: 28095
  misc_feature 1..36: note = Synthetic oligonucleotide
  source 1..36: mol_type = other DNA

SEQ ID NO: 28097 - DNA, 36 bp, synthetic construct; identical to SEQ ID NO: 28095
  misc_feature 1..36: note = Synthetic oligonucleotide
  source 1..36: mol_type = other DNA

SEQ ID NO: 28098 - DNA, 36 bp, synthetic construct; identical to SEQ ID NO: 28095
  misc_feature 1..36: note = Synthetic oligonucleotide
  source 1..36: mol_type = other DNA

SEQ ID NO: 28099 - DNA, 36 bp, synthetic construct; identical to SEQ ID NO: 28095
  misc_feature 1..36: note = Synthetic oligonucleotide
  source 1..36: mol_type = other DNA

SEQ ID NO: 28100 - DNA, 36 bp, synthetic construct
  misc_feature 1..36: note = Synthetic oligonucleotide
  source 1..36: mol_type = other DNA
gttgtatagtatttaatttctacatcaaatcacaac

SEQ ID NO: 28101 - DNA, 36 bp, synthetic construct; identical to SEQ ID NO: 28100
  misc_feature 1..36: note = Synthetic oligonucleotide
  source 1..36: mol_type = other DNA

SEQ ID NO: 28102 - DNA, 36 bp, synthetic construct; identical to SEQ ID NO: 28100
  misc_feature 1..36: note = Synthetic oligonucleotide
  source 1..36: mol_type = other DNA

SEQ ID NO: 28103 - DNA, 36 bp, synthetic construct; identical to SEQ ID NO: 28100
  misc_feature 1..36: note = Synthetic oligonucleotide
  source 1..36: mol_type = other DNA

SEQ ID NO: 28104 - DNA, 36 bp, synthetic construct; identical to SEQ ID NO: 28100
  misc_feature 1..36: note = Synthetic oligonucleotide
  source 1..36: mol_type = other DNA

SEQ ID NO: 28105 - DNA, 36 bp, synthetic construct
  misc_feature 1..36: note = Synthetic oligonucleotide
  source 1..36: mol_type = other DNA
gttgtatagttacttaaatcttgagagtacaaaaac

SEQ ID NO: 28106 - DNA, 36 bp, synthetic construct; identical to SEQ ID NO: 13115
  misc_feature 1..36: note = Synthetic oligonucleotide
  source 1..36: mol_type = other DNA

SEQ ID NO: 28107 - DNA, 36 bp, synthetic construct; identical to SEQ ID NO: 13115
  misc_feature 1..36: note = Synthetic oligonucleotide
  source 1..36: mol_type = other DNA

SEQ ID NO: 28108 - DNA, 36 bp, synthetic construct; identical to SEQ ID NO: 13115
  misc_feature 1..36: note = Synthetic oligonucleotide
  source 1..36: mol_type = other DNA

SEQ ID NO: 28109 - DNA, 36 bp, synthetic construct; identical to SEQ ID NO: 13115
  misc_feature 1..36: note = Synthetic oligonucleotide
  source 1..36: mol_type = other DNA

SEQ ID NO: 28110 - DNA, 36 bp, synthetic construct
  misc_feature 1..36: note = Synthetic oligonucleotide
  source 1..36: mol_type = other DNA
gttgtatatcgtactattcctacatcaaaccacaac

SEQ ID NO: 28111 - DNA, 37 bp, synthetic construct
  misc_feature 1..37: note = Synthetic oligonucleotide
  source 1..37: mol_type = other DNA
gttgtatatcgtactattcctacatcaaaccacaact

SEQ ID NO: 28112 - DNA, 37 bp, synthetic construct; identical to SEQ ID NO: 28111
  misc_feature 1..37: note = Synthetic oligonucleotide
  source 1..37: mol_type = other DNA

SEQ ID NO: 28113 - DNA, 36 bp, synthetic construct
  misc_feature 1..36: note = Synthetic oligonucleotide
  source 1..36: mol_type = other DNA
gttgtatatcgttctattcctacatcaaaccgcaac

SEQ ID NO: 28114 - DNA, 36 bp, synthetic construct
  misc_feature 1..36: note = Synthetic oligonucleotide
  source 1..36: mol_type = other DNA
gttgtatatctctcaaattatacaggatcctaaaac

SEQ ID NO: 28115 - DNA, 36 bp, synthetic construct
  misc_feature 1..36: note = Synthetic oligonucleotide
  source 1..36: mol_type = other DNA
gttgtatatctcttatatcctacatcaaaccacaac

SEQ ID NO: 28116 - DNA, 36 bp, synthetic construct
  misc_feature 1..36: note = Synthetic oligonucleotide
  source 1..36: mol_type = other DNA
gttgtatatctcttctcttcttcaacaagccacaac

SEQ ID NO: 28117 - DNA, 36 bp, synthetic construct
  misc_feature 1..36: note = Synthetic oligonucleotide
  source 1..36: mol_type = other DNA
gttgtatatcttaaatttcctacatcaaatcgcaac

SEQ ID NO: 28118 - DNA, 36 bp, synthetic construct
  misc_feature 1..36: note = Synthetic oligonucleotide
  source 1..36: mol_type = other DNA
gttgtatatctttatattcctacatcaaaccacaac

SEQ ID NO: 28119 - DNA, 36 bp, synthetic construct
  misc_feature 1..36: note = Synthetic oligonucleotide
  source 1..36: mol_type = other DNA
gttgtatatctttcgtttcctacatcaaaccacaac

SEQ ID NO: 28120 - DNA, 36 bp, synthetic construct; identical to SEQ ID NO: 13118
  misc_feature 1..36: note = Synthetic oligonucleotide
  source 1..36: mol_type = other DNA

SEQ ID NO: 28121 - DNA, 36 bp, synthetic construct; identical to SEQ ID NO: 13118
  misc_feature 1..36: note = Synthetic oligonucleotide
  source 1..36: mol_type = other DNA

SEQ ID NO: 28122 - DNA, 36 bp, synthetic construct
  misc_feature 1..36: note = Synthetic oligonucleotide
  source 1..36: mol_type = other DNA
gttgtatatcttttctcttcttcaacaagccacaac

SEQ ID NO: 28123 - DNA, 36 bp, synthetic construct; identical to SEQ ID NO: 28122
  misc_feature 1..36: note = Synthetic oligonucleotide
  source 1..36: mol_type = other DNA

SEQ ID NO: 28124 - DNA, 36 bp, synthetic construct
  misc_feature 1..36: note = Synthetic oligonucleotide
  source 1..36: mol_type = other DNA
gttgtatatcttttgaatcctacatcaaaccacaac

SEQ ID NO: 28125 - DNA, 36 bp, synthetic construct; identical to SEQ ID NO: 13120
  misc_feature 1..36: note = Synthetic oligonucleotide
  source 1..36: mol_type = other DNA

SEQ ID NO: 28126 - DNA, 36 bp, synthetic construct; identical to SEQ ID NO: 13120
  misc_feature 1..36: note = Synthetic oligonucleotide
  source 1..36: mol_type = other DNA

SEQ ID NO: 28127 - DNA, 36 bp, synthetic construct; identical to SEQ ID NO: 13120
  misc_feature 1..36: note = Synthetic oligonucleotide
  source 1..36: mol_type = other DNA

SEQ ID NO: 28128 - DNA, 36 bp, synthetic construct; identical to SEQ ID NO: 13120
  misc_feature 1..36: note = Synthetic oligonucleotide
  source 1..36: mol_type = other DNA

SEQ ID NO: 28129 - DNA, 36 bp, synthetic construct; identical to SEQ ID NO: 13120
  misc_feature 1..36: note = Synthetic oligonucleotide
  source 1..36: mol_type = other DNA

SEQ ID NO: 28130 - DNA, 36 bp, synthetic construct; identical to SEQ ID NO: 13120
  misc_feature 1..36: note = Synthetic oligonucleotide
  source 1..36: mol_type = other DNA

SEQ ID NO: 28131 - DNA, 36 bp, synthetic construct; identical to SEQ ID NO: 13120
  misc_feature 1..36: note = Synthetic oligonucleotide
  source 1..36: mol_type = other DNA

SEQ ID NO: 28132 - DNA, 36 bp, synthetic construct; identical to SEQ ID NO: 13120
  misc_feature 1..36: note = Synthetic oligonucleotide
  source 1..36: mol_type = other DNA

SEQ ID NO: 28133 - DNA, 36 bp, synthetic construct; identical to SEQ ID NO: 13120
  misc_feature 1..36: note = Synthetic oligonucleotide
  source 1..36: mol_type = other DNA

SEQ ID NO: 28134 - DNA, 36 bp, synthetic construct; identical to SEQ ID NO: 13120
  misc_feature 1..36: note = Synthetic oligonucleotide
  source 1..36: mol_type = other DNA

SEQ ID NO: 28135 - DNA, 36 bp, synthetic construct; identical to SEQ ID NO: 13120
  misc_feature 1..36: note = Synthetic oligonucleotide
  source 1..36: mol_type = other DNA

SEQ ID NO: 28136 - DNA, 36 bp, synthetic construct; identical to SEQ ID NO: 13120
  misc_feature 1..36: note = Synthetic oligonucleotide
  source 1..36: mol_type = other DNA

SEQ ID NO: 28137 - DNA, 36 bp, synthetic construct
  misc_feature 1..36: note = Synthetic oligonucleotide
  source 1..36: mol_type = other DNA
gttgtatatgatacgattttgtcagctattcacaac

SEQ ID NO: 28138 - DNA, 33 bp, synthetic construct
  misc_feature 1..33: note = Synthetic oligonucleotide
  source 1..33: mol_type = other DNA
gttgtatatgcgggtgcaaaggtactaattttt

SEQ ID NO: 28139 - DNA, 36 bp, synthetic construct
  misc_feature 1..36: note = Synthetic oligonucleotide
  source 1..36: mol_type = other DNA
gttgtatatttctcaaattatacagaatcctaaaac

SEQ ID NO: 28140 - DNA, 36 bp, synthetic construct
  misc_feature 1..36: note = Synthetic oligonucleotide
  source 1..36: mol_type = other DNA
gttgtatcatattaggattctacatcaaaccacaac

SEQ ID NO: 28141 - DNA, 36 bp, synthetic construct
  misc_feature 1..36: note = Synthetic oligonucleotide
  source 1..36: mol_type = other DNA
gttgtatcgtatcaatgttctacatcagaccacaac

SEQ ID NO: 28142 - DNA, 36 bp, synthetic construct; identical to SEQ ID NO: 28141
  misc_feature 1..36: note = Synthetic oligonucleotide
  source 1..36: mol_type = other DNA

SEQ ID NO: 28143 - DNA, 27 bp, synthetic construct
  misc_feature 1..27: note = Synthetic oligonucleotide
  source 1..27: mol_type = other DNA
gttgtatctcatataccaaaggtacga

SEQ ID NO: 28144 - DNA, 36 bp, synthetic construct
  misc_feature 1..36: note = Synthetic oligonucleotide
  source 1..36: mol_type = other DNA
gttgtatcttatcaatgttctacatcagaccacaac

SEQ ID NO: 28145 - DNA, 36 bp, synthetic construct; identical to SEQ ID NO: 28144
  misc_feature 1..36: note = Synthetic oligonucleotide
  source 1..36: mol_type = other DNA

SEQ ID NO: 28146 - DNA, 36 bp, synthetic construct; identical to SEQ ID NO: 13130
  misc_feature 1..36: note = Synthetic oligonucleotide
  source 1..36: mol_type = other DNA

SEQ ID NO: 28147 - DNA, 36 bp, synthetic construct
  misc_feature 1..36: note = Synthetic oligonucleotide
  source 1..36: mol_type = other DNA
gttgtatcttatcgaaattccacatcaaaccacaac

SEQ ID NO: 28148 - DNA, 36 bp, synthetic construct; identical to SEQ ID NO: 28147
  misc_feature 1..36: note = Synthetic oligonucleotide
  source 1..36: mol_type = other DNA

SEQ ID NO: 28149 - DNA, 36 bp, synthetic construct; identical to SEQ ID NO: 28147
  misc_feature 1..36: note = Synthetic oligonucleotide
  source 1..36: mol_type = other DNA

SEQ ID NO: 28150 - DNA, 36 bp, synthetic construct; identical to SEQ ID NO: 13133
  misc_feature 1..36: note = Synthetic oligonucleotide
  source 1..36: mol_type = other DNA

SEQ ID NO: 28151 - DNA, 36 bp, synthetic construct; identical to SEQ ID NO: 13133
  misc_feature 1..36: note = Synthetic oligonucleotide
  source 1..36: mol_type = other DNA

SEQ ID NO: 28152 - DNA, 36 bp, synthetic construct; identical to SEQ ID NO: 13133
  misc_feature 1..36: note = Synthetic oligonucleotide
  source 1..36: mol_type = other DNA

SEQ ID NO: 28153 - DNA, 36 bp, synthetic construct; identical to SEQ ID NO: 13133
  misc_feature 1..36: note = Synthetic oligonucleotide
  source 1..36: mol_type = other DNA

SEQ ID NO: 28154 - DNA, 36 bp, synthetic construct; identical to SEQ ID NO: 13133
  misc_feature 1..36: note = Synthetic oligonucleotide
  source 1..36: mol_type = other DNA

SEQ ID NO: 28155 - DNA, 36 bp, synthetic construct; identical to SEQ ID NO: 13133
  misc_feature 1..36: note = Synthetic oligonucleotide
  source 1..36: mol_type = other DNA

SEQ ID NO: 28156 - DNA, 36 bp, synthetic construct; identical to SEQ ID NO: 13133
  misc_feature 1..36: note = Synthetic oligonucleotide
  source 1..36: mol_type = other DNA

SEQ ID NO: 28157 - DNA, 36 bp, synthetic construct; identical to SEQ ID NO: 13133
  misc_feature 1..36: note = Synthetic oligonucleotide
  source 1..36: mol_type = other DNA

SEQ ID NO: 28158 - DNA, 36 bp, synthetic construct; identical to SEQ ID NO: 13133
  misc_feature 1..36: note = Synthetic oligonucleotide
  source 1..36: mol_type = other DNA

SEQ ID NO: 28159 - DNA, 36 bp, synthetic construct; identical to SEQ ID NO: 13133
  misc_feature 1..36: note = Synthetic oligonucleotide
  source 1..36: mol_type = other DNA

SEQ ID NO: 28160 - DNA, 36 bp, synthetic construct; identical to SEQ ID NO: 13133
  misc_feature 1..36: note = Synthetic oligonucleotide
  source 1..36: mol_type = other DNA

SEQ ID NO: 28161 - DNA, 36 bp, synthetic construct; identical to SEQ ID NO: 13133
  misc_feature 1..36: note = Synthetic oligonucleotide
  source 1..36: mol_type = other DNA

SEQ ID NO: 28162 - DNA, 36 bp, synthetic construct; identical to SEQ ID NO: 13133
  misc_feature 1..36: note = Synthetic oligonucleotide
  source 1..36: mol_type = other DNA

SEQ ID NO: 28163 - DNA, 36 bp, synthetic construct; identical to SEQ ID NO: 13133
  misc_feature 1..36: note = Synthetic oligonucleotide
  source 1..36: mol_type = other DNA

SEQ ID NO: 28164 - DNA, 36 bp, synthetic construct; identical to SEQ ID NO: 13133
  misc_feature 1..36: note = Synthetic oligonucleotide
  source 1..36: mol_type = other DNA

SEQ ID NO: 28165 - DNA, 36 bp, synthetic construct; identical to SEQ ID NO: 13133
  misc_feature 1..36: note = Synthetic oligonucleotide
  source 1..36: mol_type = other DNA

SEQ ID NO: 28166 - DNA, 36 bp, synthetic construct; identical to SEQ ID NO: 13133
  misc_feature 1..36: note = Synthetic oligonucleotide
  source 1..36: mol_type = other DNA

SEQ ID NO: 28167 - DNA, 36 bp, synthetic construct; identical to SEQ ID NO: 13133
  misc_feature 1..36: note = Synthetic oligonucleotide
  source 1..36: mol_type = other DNA

SEQ ID NO: 28168 - DNA, 36 bp, synthetic construct; identical to SEQ ID NO: 13133
  misc_feature 1..36: note = Synthetic oligonucleotide
  source 1..36: mol_type = other DNA

SEQ ID NO: 28169 - DNA, 36 bp, synthetic construct; identical to SEQ ID NO: 13133
  misc_feature 1..36: note = Synthetic oligonucleotide
  source 1..36: mol_type = other DNA

SEQ ID NO: 28170 - DNA, 36 bp, synthetic construct; identical to SEQ ID NO: 13133
  misc_feature 1..36: note = Synthetic oligonucleotide
  source 1..36: mol_type = other DNA

SEQ ID NO: 28171 - DNA, 36 bp, synthetic construct; identical to SEQ ID NO: 13133
  misc_feature 1..36: note = Synthetic oligonucleotide
  source 1..36: mol_type = other DNA

SEQ ID NO: 28172 - DNA, 36 bp, synthetic construct; identical to SEQ ID NO: 13133
  misc_feature 1..36: note = Synthetic oligonucleotide
  source 1..36: mol_type = other DNA

SEQ ID NO: 28173 - DNA, 36 bp, synthetic construct; identical to SEQ ID NO: 13133
  misc_feature 1..36: note = Synthetic oligonucleotide
  source 1..36: mol_type = other DNA

SEQ ID NO: 28174 - DNA, 36 bp, synthetic construct; identical to SEQ ID NO: 13133
  misc_feature 1..36: note = Synthetic oligonucleotide
  source 1..36: mol_type = other DNA

SEQ ID NO: 28175 - DNA, 36 bp, synthetic construct
  misc_feature 1..36: note = Synthetic oligonucleotide
  source 1..36: mol_type = other DNA
gttgtatcttatcttatttcatcatcaaaccacaac

SEQ ID NO: 28176 - DNA, 36 bp, synthetic construct
  misc_feature 1..36: note = Synthetic oligonucleotide
  source 1..36: mol_type = other DNA
gttgtatcttattaaaaatctacatcaaaccacaac

SEQ ID NO: 28177 - DNA, 36 bp, synthetic construct
  misc_feature 1..36: note = Synthetic oligonucleotide
  source 1..36: mol_type = other DNA
gttgtatcttattaaaattctacatcaaaccacaac

SEQ ID NO: 28178 - DNA, 36 bp, synthetic construct; identical to SEQ ID NO: 28177
  misc_feature 1..36: note = Synthetic oligonucleotide
  source 1..36: mol_type = other DNA

SEQ ID NO: 28179 - DNA, 36 bp, synthetic construct; identical to SEQ ID NO: 28177
  misc_feature 1..36: note = Synthetic oligonucleotide
  source 1..36: mol_type = other DNA

SEQ ID NO: 28180 - DNA, 36 bp, synthetic construct; identical to SEQ ID NO: 28177
  misc_feature 1..36: note = Synthetic oligonucleotide
  source 1..36: mol_type = other DNA

SEQ ID NO: 28181 - DNA, 36 bp, synthetic construct; identical to SEQ ID NO: 28177
  misc_feature 1..36: note = Synthetic oligonucleotide
  source 1..36: mol_type = other DNA

SEQ ID NO: 28182 - DNA, 36 bp, synthetic construct
  misc_feature 1..36: note = Synthetic oligonucleotide
  source 1..36: mol_type = other DNA
gttgtatcttattccatttctacatcaaaccacaac

SEQ ID NO: 28183 - DNA, 36 bp, synthetic construct; identical to SEQ ID NO: 13134
  misc_feature 1..36: note = Synthetic oligonucleotide
  source 1..36: mol_type = other DNA

SEQ ID NO: 28184 - DNA, 36 bp, synthetic construct
  misc_feature 1..36: note = Synthetic oligonucleotide
  source 1..36: mol_type = other DNA
gttgtatcttattctgtttctacatcaaaccacaac

SEQ ID NO: 28185 - DNA, 36 bp, synthetic construct
  misc_feature 1..36: note = Synthetic oligonucleotide
  source 1..36: mol_type = other DNA
gttgtatcttattgaaattccacatcaaaccacaac

SEQ ID NO: 28186 - DNA, 36 bp, synthetic construct; identical to SEQ ID NO: 13135
  misc_feature 1..36: note = Synthetic oligonucleotide
  source 1..36: mol_type = other DNA

SEQ ID NO: 28187 - DNA, 36 bp, synthetic construct; identical to SEQ ID NO: 13135
  misc_feature 1..36: note = Synthetic oligonucleotide
  source 1..36: mol_type = other DNA

SEQ ID NO: 28188 - DNA, 36 bp, synthetic construct; identical to SEQ ID NO: 13135
  misc_feature 1..36: note = Synthetic oligonucleotide
  source 1..36: mol_type = other DNA

SEQ ID NO: 28189 - DNA, 36 bp, synthetic construct; identical to SEQ ID NO: 13135
  misc_feature 1..36: note = Synthetic oligonucleotide
  source 1..36: mol_type = other DNA

SEQ ID NO: 28190 - DNA, 36 bp, synthetic construct; identical to SEQ ID NO: 13135
  misc_feature 1..36: note = Synthetic oligonucleotide
  source 1..36: mol_type = other DNA

SEQ ID NO: 28191 - DNA, 36 bp, synthetic construct; identical to SEQ ID NO: 13135
  misc_feature 1..36: note = Synthetic oligonucleotide
  source 1..36: mol_type = other DNA

SEQ ID NO: 28192 - DNA, 36 bp, synthetic construct; identical to SEQ ID NO: 13135
  misc_feature 1..36: note = Synthetic oligonucleotide
  source 1..36: mol_type = other DNA

SEQ ID NO: 28193 - DNA, 36 bp, synthetic construct; identical to SEQ ID NO: 13135
  misc_feature 1..36: note = Synthetic oligonucleotide
  source 1..36: mol_type = other DNA

SEQ ID NO: 28194 - DNA, 36 bp, synthetic construct; identical to SEQ ID NO: 13135
  misc_feature 1..36: note = Synthetic oligonucleotide
  source 1..36: mol_type = other DNA

SEQ ID NO: 28195 - DNA, 37 bp, synthetic construct
  misc_feature 1..37: note = Synthetic oligonucleotide
  source 1..37: mol_type = other DNA
gttgtatcttattgaaattctacatcaaaccacaacg

SEQ ID NO: 28196 - DNA, 36 bp, synthetic construct
  misc_feature 1..36: note = Synthetic oligonucleotide
  source 1..36: mol_type = other DNA
gttgtatcttattgaaattttacatcaaaccacaac

SEQ ID NO: 28197 - DNA, 36 bp, synthetic construct; identical to SEQ ID NO: 28196
  misc_feature 1..36: note = Synthetic oligonucleotide
  source 1..36: mol_type = other DNA

SEQ ID NO: 28198 - DNA, 36 bp, synthetic construct; identical to SEQ ID NO: 13136
  misc_feature 1..36: note = Synthetic oligonucleotide
  source 1..36: mol_type = other DNA

SEQ ID NO: 28199 - DNA, 36 bp, synthetic construct; identical to SEQ ID NO: 13136
  misc_feature 1..36: note = Synthetic oligonucleotide
  source 1..36: mol_type = other DNA

SEQ ID NO: 28200 - DNA, 36 bp, synthetic construct; identical to SEQ ID NO: 13136
  misc_feature 1..36: note = Synthetic oligonucleotide
  source 1..36: mol_type = other DNA

SEQ ID NO: 28201 - DNA, 36 bp, synthetic construct; identical to SEQ ID NO: 13136
  misc_feature 1..36: note = Synthetic oligonucleotide
  source 1..36: mol_type = other DNA

SEQ ID NO: 28202 - DNA, 36 bp, synthetic construct; identical to SEQ ID NO: 13136
  misc_feature 1..36: note = Synthetic oligonucleotide
  source 1..36: mol_type = other DNA

SEQ ID NO: 28203 - DNA, 36 bp, synthetic construct
  misc_feature 1..36: note = Synthetic oligonucleotide
  source 1..36: mol_type = other DNA
gttgtatcttattggatctctacatcaaaccacaac

SEQ ID NO: 28204 - DNA, 36 bp, synthetic construct; identical to SEQ ID NO: 28203
  misc_feature 1..36: note = Synthetic oligonucleotide
  source 1..36: mol_type = other DNA

SEQ ID NO: 28205 - DNA, 36 bp, synthetic construct; identical to SEQ ID NO: 28203
  misc_feature 1..36: note = Synthetic oligonucleotide
  source 1..36: mol_type = other DNA

SEQ ID NO: 28206 - DNA, 36 bp, synthetic construct; identical to SEQ ID NO: 28203
  misc_feature 1..36: note = Synthetic oligonucleotide
  source 1..36: mol_type = other DNA

SEQ ID NO: 28207 - DNA, 36 bp, synthetic construct; identical to SEQ ID NO: 28203
  misc_feature 1..36: note = Synthetic oligonucleotide
  source 1..36: mol_type = other DNA

SEQ ID NO: 28208 - DNA, 36 bp, synthetic construct
  misc_feature 1..36: note = Synthetic oligonucleotide
  source 1..36: mol_type = other DNA
gttgtatcttattggatttctacatcaaaccacaac

SEQ ID NO: 28209 - DNA, 36 bp, synthetic construct
  misc_feature 1..36: note = Synthetic oligonucleotide
  source 1..36: mol_type = other DNA
gttgtattacatcgtttctctacatcaaaccacaac

SEQ ID NO: 28210 - DNA, 36 bp, synthetic construct; identical to SEQ ID NO: 13141
  misc_feature 1..36: note = Synthetic oligonucleotide
  source 1..36: mol_type = other DNA

SEQ ID NO: 28211 - DNA, 36 bp, synthetic construct; identical to SEQ ID NO: 13141
  misc_feature 1..36: note = Synthetic oligonucleotide
  source 1..36: mol_type = other DNA

SEQ ID NO: 28212 - DNA, 36 bp, synthetic construct; identical to SEQ ID NO: 13141
  misc_feature 1..36: note = Synthetic oligonucleotide
  source 1..36: mol_type = other DNA

SEQ ID NO: 28213 - DNA, 36 bp, synthetic construct; identical to SEQ ID NO: 13141
  misc_feature 1..36: note = Synthetic oligonucleotide
  source 1..36: mol_type = other DNA

SEQ ID NO: 28214 - DNA, 36 bp, synthetic construct; identical to SEQ ID NO: 13141
  misc_feature 1..36: note = Synthetic oligonucleotide
  source 1..36: mol_type = other DNA

SEQ ID NO: 28215 - DNA, 36 bp, synthetic construct; identical to SEQ ID NO: 13143
  misc_feature 1..36: note = Synthetic oligonucleotide
  source 1..36: mol_type = other DNA

SEQ ID NO: 28216 - DNA, 36 bp, synthetic construct; identical to SEQ ID NO: 13143
  misc_feature 1..36: note = Synthetic oligonucleotide
  source 1..36: mol_type = other DNA

SEQ ID NO: 28217 - DNA, 36 bp, synthetic construct; identical to SEQ ID NO: 13143
  misc_feature 1..36: note = Synthetic oligonucleotide
  source 1..36: mol_type = other DNA

SEQ ID NO: 28218 - DNA, 36 bp, synthetic construct; identical to SEQ ID NO: 13143
  misc_feature 1..36: note = Synthetic oligonucleotide
  source 1..36: mol_type = other DNA

SEQ ID NO: 28219 - DNA, 36 bp, synthetic construct; identical to SEQ ID NO: 13143
  misc_feature 1..36: note = Synthetic oligonucleotide
  source 1..36: mol_type = other DNA

SEQ ID NO: 28220 - DNA, 36 bp, synthetic construct; identical to SEQ ID NO: 13143
  misc_feature 1..36: note = Synthetic oligonucleotide
  source 1..36: mol_type = other DNA

SEQ ID NO: 28221 - DNA, 36 bp, synthetic construct; identical to SEQ ID NO: 13143
  misc_feature 1..36: note = Synthetic oligonucleotide
  source 1..36: mol_type = other DNA

SEQ ID NO: 28222 - DNA, 36 bp, synthetic construct; identical to SEQ ID NO: 13144
  misc_feature 1..36: note = Synthetic oligonucleotide
  source 1..36: mol_type = other DNA

SEQ ID NO: 28223 - DNA, 36 bp, synthetic construct; identical to SEQ ID NO: 13144
  misc_feature 1..36: note = Synthetic oligonucleotide
  source 1..36: mol_type = other DNA

SEQ ID NO: 28224 - DNA, 36 bp, synthetic construct; identical to SEQ ID NO: 13144
  misc_feature 1..36: note = Synthetic oligonucleotide
  source 1..36: mol_type = other DNA

SEQ ID NO: 28225 - DNA, 37 bp, synthetic construct
  misc_feature 1..37: note = Synthetic oligonucleotide
  source 1..37: mol_type = other DNA
gttgtatttaccaatgcaaagatactaattttaaagc

SEQ ID NO: 28226 - DNA, 36 bp, synthetic construct
  misc_feature 1..36: note = Synthetic oligonucleotide
  source 1..36: mol_type = other DNA
gttgtatttgacggtctaattaatctctgataccac

SEQ ID NO: 28227 - DNA, 36 bp, synthetic construct
  misc_feature 1..36: note = Synthetic oligonucleotide
  source 1..36: mol_type = other DNA
gttgtcaaaaataataaatcctattcaaatcacaac

SEQ ID NO: 28228 - DNA, 36 bp, synthetic construct
  misc_feature 1..36: note = Synthetic oligonucleotide
  source 1..36: mol_type = other DNA
gttgtcaaagatacaattttaaaggcttttcacaac

SEQ ID NO: 28229 - DNA, 36 bp, synthetic construct; identical to SEQ ID NO: 28228
  misc_feature 1..36: note = Synthetic oligonucleotide
  source 1..36: mol_type = other DNA

SEQ ID NO: 28230 - DNA, 36 bp, synthetic construct
  misc_feature 1..36: note = Synthetic oligonucleotide
  source 1..36: mol_type = other DNA
gttgtcaaagatcgcggctcggtatcagatcacagc

SEQ ID NO: 28231 - DNA, 36 bp, synthetic construct; identical to SEQ ID NO: 13153
  misc_feature 1..36: note = Synthetic oligonucleotide
  source 1..36: mol_type = other DNA

SEQ ID NO: 28232 - DNA, 36 bp, synthetic construct
  misc_feature 1..36: note = Synthetic oligonucleotide
  source 1..36: mol_type = other DNA
gttgtcaaatacctcttttctacatcaaaccacaac

SEQ ID NO: 28233 - DNA, 30 bp, synthetic construct
  misc_feature 1..30: note = Synthetic oligonucleotide
  source 1..30: mol_type = other DNA
gttgtcaatgcaggtgcaaagatacaaatt

SEQ ID NO: 28234 - DNA, 36 bp, synthetic construct
  misc_feature 1..36: note = Synthetic oligonucleotide
  source 1..36: mol_type = other DNA
gttgtcctagcgccacctattcctgagtgctagact

SEQ ID NO: 28235 - DNA, 36 bp, synthetic construct; identical to SEQ ID NO: 28234
  misc_feature 1..36: note = Synthetic oligonucleotide
  source 1..36: mol_type = other DNA

SEQ ID NO: 28236 - DNA, 36 bp, synthetic construct
  misc_feature 1..36: note = Synthetic oligonucleotide
  source 1..36: mol_type = other DNA
gttgtcgcttatcgacctaaaagtacaaattgaaag

SEQ ID NO: 28237 - DNA, 36 bp, synthetic construct
  misc_feature 1..36: note = Synthetic oligonucleotide
  source 1..36: mol_type = other DNA
gttgtcgtttgaccgctttctctgatctgctaggat

SEQ ID NO: 28238 - DNA, 36 bp, synthetic construct
  misc_feature 1..36: note = Synthetic oligonucleotide
  source 1..36: mol_type = other DNA
gttgtcgtttgatgtaggaacaagatgataaacaac

SEQ ID NO: 28239 - DNA, 36 bp, synthetic construct; identical to SEQ ID NO: 13178
  misc_feature 1..36: note = Synthetic oligonucleotide
  source 1..36: mol_type = other DNA

SEQ ID NO: 28240 - DNA, 34 bp, synthetic construct
  misc_feature 1..34: note = Synthetic oligonucleotide
  source 1..34: mol_type = other DNA
gttgtcttaagccacagtaaaaatacaatttgaa

SEQ ID NO: 28241 - DNA, 36 bp, synthetic construct
  misc_feature 1..36: note = Synthetic oligonucleotide
  source 1..36: mol_type = other DNA
gttgtcttagcaccgcttattcccatgtgttaaact

SEQ ID NO: 28242 - DNA, 36 bp, synthetic construct; identical to SEQ ID NO: 28241
  misc_feature 1..36: note = Synthetic oligonucleotide
  source 1..36: mol_type = other DNA

SEQ ID NO: 28243 - DNA, 36 bp, synthetic construct
  misc_feature 1..36: note = Synthetic oligonucleotide
  source 1..36: mol_type = other DNA
gttgtcttagcgccacctattcctgactgatagact

SEQ ID NO: 28244 - DNA, 36 bp, synthetic construct; identical to SEQ ID NO: 28243
  misc_feature 1..36: note = Synthetic oligonucleotide
  source 1..36: mol_type = other DNA

SEQ ID NO: 28245 - DNA, 36 bp, synthetic construct
  misc_feature 1..36: note = Synthetic oligonucleotide
  source 1..36: mol_type = other DNA
gttgtcttatatctgttttctacatcaaaccacaac

SEQ ID NO: 28246 - DNA, 36 bp, synthetic construct
  misc_feature 1..36: note = Synthetic oligonucleotide
  source 1..36: mol_type = other DNA
gttgtcttctatcttgcaaagatactaatttgaaag

SEQ ID NO: 28247 - DNA, 36 bp, synthetic construct; identical to SEQ ID NO: 13185
  misc_feature 1..36: note = Synthetic oligonucleotide
  source 1..36: mol_type = other DNA

SEQ ID NO: 28248 - DNA, 34 bp, synthetic construct
  misc_feature 1..34: note = Synthetic oligonucleotide
  source 1..34: mol_type = other DNA
gttgtgaacgataatgcaaagatacgattctgaa

SEQ ID NO: 28249 - DNA, 36 bp, synthetic construct
  misc_feature 1..36: note = Synthetic oligonucleotide
  source 1..36: mol_type = other DNA
gttgtgaacggccgcgaagcgtcgcttcgatagact

SEQ ID NO: 28250 - DNA, 36 bp, synthetic construct
  misc_feature 1..36: note = Synthetic oligonucleotide
  source 1..36: mol_type = other DNA
gttgtgaatacctctcaaaattagtacagaacaata

SEQ ID NO: 28251 - DNA, 21 bp, synthetic construct
  misc_feature 1..21: note = Synthetic oligonucleotide
  source 1..21: mol_type = other DNA
gttgtgaatagctcgcagatt

SEQ ID NO: 28252 - DNA, 36 bp, synthetic construct
  misc_feature 1..36: note = Synthetic oligonucleotide
  source 1..36: mol_type = other DNA
gttgtgaatagctgacaaaatcgtatcatatacaac

SEQ ID NO: 28253 - DNA, 36 bp, synthetic construct; identical to SEQ ID NO: 28252
  misc_feature 1..36: note = Synthetic oligonucleotide
  source 1..36: mol_type = other DNA

SEQ ID NO: 28254 - DNA, 36 bp, synthetic construct; identical to SEQ ID NO: 13205
  misc_feature 1..36: note = Synthetic oligonucleotide
  source 1..36: mol_type = other DNA

SEQ ID NO: 28255 - DNA, 36 bp, synthetic construct
  misc_feature 1..36: note = Synthetic oligonucleotide
  source 1..36: mol_type = other DNA
gttgtgaatcgcgggcaggcatcggtcagttacaat

SEQ ID NO: 28256 - DNA, 36 bp, synthetic construct
  misc_feature 1..36: note = Synthetic oligonucleotide
  source 1..36: mol_type = other DNA
gttgtgaatcgctcccgggccctgatccgttacact

SEQ ID NO: 28257 - DNA, 36 bp, synthetic construct
  misc_feature 1..36: note = Synthetic oligonucleotide
  source 1..36: mol_type = other DNA
gttgtgaatcgctttcaaattgtaatttagcacaac

SEQ ID NO: 28258 - DNA, 36 bp, synthetic construct
  misc_feature 1..36: note = Synthetic oligonucleotide
  source 1..36: mol_type = other DNA
gttgtgaatggcttacagattactacctgatacacc

SEQ ID NO: 28259 - DNA, 23 bp, synthetic construct
  misc_feature 1..23: note = Synthetic oligonucleotide
  source 1..23: mol_type = other DNA
gttgtgaatggcttacggattac

SEQ ID NO: 28260 - DNA, 35 bp, synthetic construct
  misc_feature 1..35: note = Synthetic oligonucleotide
  source 1..35: mol_type = other DNA
gttgtgaattactttcaaaatttgtatctttgtga

SEQ ID NO: 28261 - DNA, 38 bp, synthetic construct
  misc_feature 1..38: note = Synthetic oligonucleotide
  source 1..38: mol_type = other DNA
gttgtgaattactttcagaatttgtatctttgtgactt

SEQ ID NO: 28262 - DNA, 36 bp, synthetic construct
  misc_feature 1..36: note = Synthetic oligonucleotide
  source 1..36: mol_type = other DNA
gttgtgaattgacatcaggtcgggatttgttacact

SEQ ID NO: 28263 - DNA, 36 bp, synthetic construct; identical to SEQ ID NO: 13217
  misc_feature 1..36: note = Synthetic oligonucleotide
  source 1..36: mol_type = other DNA

SEQ ID NO: 28264 - DNA, 36 bp, synthetic construct; identical to SEQ ID NO: 13217
  misc_feature 1..36: note = Synthetic oligonucleotide
  source 1..36: mol_type = other DNA

SEQ ID NO: 28265 - DNA, 36 bp, synthetic construct
  misc_feature 1..36: note = Synthetic oligonucleotide
  source 1..36: mol_type = other DNA
gttgtgaattgactgcgggctgggatcagttacact

SEQ ID NO: 28266 - DNA, 36 bp, synthetic construct
  misc_feature 1..36: note = Synthetic oligonucleotide
  source 1..36: mol_type = other DNA
gttgtgaattgattacgaattggagattgttacatt

SEQ ID NO: 28267 - DNA, 36 bp, synthetic construct
  misc_feature 1..36: note = Synthetic oligonucleotide
  source 1..36: mol_type = other DNA
gttgtgaattgcgggcggatatcggatgattgtaac

SEQ ID NO: 28268 - DNA, 36 bp, synthetic construct
  misc_feature 1..36: note = Synthetic oligonucleotide
  source 1..36: mol_type = other DNA
gttgtgaattgctcacagataagtacctttaacatc

SEQ ID NO: 28269 - DNA, 36 bp, synthetic construct; identical to SEQ ID NO: 28268
  misc_feature 1..36: note = Synthetic oligonucleotide
  source 1..36: mol_type = other DNA

SEQ ID NO: 28270 - DNA, 36 bp, synthetic construct; identical to SEQ ID NO: 13232
  misc_feature 1..36: note = Synthetic oligonucleotide
  source 1..36: mol_type = other DNA

SEQ ID NO: 28271 - DNA, 26 bp, synthetic construct
  misc_feature 1..26: note = Synthetic oligonucleotide
  source 1..26: mol_type = other DNA
gttgtgaattgctctcaaattttgta

SEQ ID NO: 28272 - DNA, 26 bp, synthetic construct
  misc_feature 1..26: note = Synthetic oligonucleotide
  source 1..26: mol_type = other DNA
gttgtgaattgcttccaaattttgta

SEQ ID NO: 28273 - DNA, 36 bp, synthetic construct
  misc_feature 1..36: note = Synthetic oligonucleotide
  source 1..36: mol_type = other DNA
gttgtgaattgctttaaaaatcttatctttaacaac

SEQ ID NO: 28274 - DNA, 36 bp, synthetic construct
  misc_feature 1..36: note = Synthetic oligonucleotide
  source 1..36: mol_type = other DNA
gttgtgaattgctttcaaaaaaggatttgttaaatt

SEQ ID NO: 28275 - DNA, 34 bp, synthetic construct
  misc_feature 1..34: note = Synthetic oligonucleotide
  source 1..34: mol_type = other DNA
gttgtgaattgctttcaaaaatttgtatctttgt

SEQ ID NO: 28276 - DNA, 34 bp, synthetic construct; identical to SEQ ID NO: 28275
  misc_feature 1..34: note = Synthetic oligonucleotide
  source 1..34: mol_type = other DNA

SEQ ID NO: 28277 - DNA, 34 bp, synthetic construct
  misc_feature 1..34: note = Synthetic oligonucleotide
  source 1..34: mol_type = other DNA
gttgtgaattgctttcaaaagtttgtatctttgt

SEQ ID NO: 28278 - DNA, 36 bp, synthetic construct
  misc_feature 1..36: note = Synthetic oligonucleotide
  source 1..36: mol_type = other DNA
gttgtgaattgctttcaaattgtagatttacacagt

SEQ ID NO: 28279 - DNA, 36 bp, synthetic construct; identical to SEQ ID NO: 13302
  misc_feature 1..36: note = Synthetic oligonucleotide
  source 1..36: mol_type = other DNA

SEQ ID NO: 28280 - DNA, 32 bp, synthetic construct
  misc_feature 1..32: note = Synthetic oligonucleotide
  source 1..32: mol_type = other DNA
gttgtgaattgctttcaaatttcgtagctttg

SEQ ID NO: 28281 - DNA, 31 bp, synthetic construct
  misc_feature 1..31: note = Synthetic oligonucleotide
  source 1..31: mol_type = other DNA
gttgtgaattgctttcaaatttcgtagtttt

SEQ ID NO: 28282 - DNA, 27 bp, synthetic construct
  misc_feature 1..27: note = Synthetic oligonucleotide
  source 1..27: mol_type = other DNA
gttgtgaattgctttcaaatttgtatc

SEQ ID NO: 28283 - DNA, 32 bp, synthetic construct
  misc_feature 1..32: note = Synthetic oligonucleotide
  source 1..32: mol_type = other DNA
gttgtgaattgctttcaaattttatagttttg

SEQ ID NO: 28284 - DNA, 24 bp, synthetic construct
  misc_feature 1..24: note = Synthetic oligonucleotide
  source 1..24: mol_type = other DNA
gttgtgaattgctttcaaattttg

SEQ ID NO: 28285 - DNA, 26 bp, synthetic construct
  misc_feature 1..26: note = Synthetic oligonucleotide
  source 1..26: mol_type = other DNA
gttgtgaattgctttcaaattttgta

SEQ ID NO: 28286 - DNA, 26 bp, synthetic construct
  misc_feature 1..26: note = Synthetic oligonucleotide
  source 1..26: mol_type = other DNA
gttgtgaattgctttcaaattttgta

SEQ ID NO: 28287 - DNA, 37 bp, synthetic construct
  misc_feature 1..37: note = Synthetic oligonucleotide
  source 1..37: mol_type = other DNA
gttgtgaattgctttcaaattttgtagctttgtgatt

SEQ ID NO: 28288 - DNA, 30 bp, synthetic construct
  misc_feature 1..30: note = Synthetic oligonucleotide
  source 1..30: mol_type = other DNA
gttgtgaattgctttcaaattttgtagttt

SEQ ID NO: 28289 - DNA, 31 bp, synthetic construct
  misc_feature 1..31: note = Synthetic oligonucleotide
  source 1..31: mol_type = other DNA
gttgtgaattgctttcaaattttgtagtttt

SEQ ID NO: 28290 - DNA, 32 bp, synthetic construct
  misc_feature 1..32: note = Synthetic oligonucleotide
  source 1..32: mol_type = other DNA
gttgtgaattgctttcaaattttgtagttttg

SEQ ID NO: 28291 - DNA, 32 bp, synthetic construct; identical to SEQ ID NO: 28290
  misc_feature 1..32: note = Synthetic oligonucleotide
  source 1..32: mol_type = other DNA

SEQ ID NO: 28292 - DNA, 32 bp, synthetic construct; identical to SEQ ID NO: 28290
  misc_feature 1..32: note = Synthetic oligonucleotide
  source 1..32: mol_type = other DNA

SEQ ID NO: 28293 - DNA, 32 bp, synthetic construct; identical to SEQ ID NO: 28290
  misc_feature 1..32: note = Synthetic oligonucleotide
  source 1..32: mol_type = other DNA

SEQ ID NO: 28294 - DNA, 32 bp, synthetic construct; identical to SEQ ID NO: 28290
  misc_feature 1..32: note = Synthetic oligonucleotide
  source 1..32: mol_type = other DNA

SEQ ID NO: 28295 - DNA, 32 bp, synthetic construct; identical to SEQ ID NO: 28290
  misc_feature 1..32: note = Synthetic oligonucleotide
  source 1..32: mol_type = other DNA

SEQ ID NO: 28296 - DNA, 32 bp, synthetic construct; identical to SEQ ID NO: 28290
  misc_feature 1..32: note = Synthetic oligonucleotide
  source 1..32: mol_type = other DNA

SEQ ID NO: 28297 - DNA, 32 bp, synthetic construct; identical to SEQ ID NO: 28290
  misc_feature 1..32: note = Synthetic oligonucleotide
  source 1..32: mol_type = other DNA

SEQ ID NO: 28298 - DNA, 32 bp, synthetic construct; identical to SEQ ID NO: 28290
  misc_feature 1..32: note = Synthetic oligonucleotide
  source 1..32: mol_type = other DNA

SEQ ID NO: 28299 - DNA, 32 bp, synthetic construct; identical to SEQ ID NO: 28290
  misc_feature 1..32: note = Synthetic oligonucleotide
  source 1..32: mol_type = other DNA

SEQ ID NO: 28300 - DNA, 32 bp, synthetic construct; identical to SEQ ID NO: 28290
  misc_feature 1..32: note = Synthetic oligonucleotide
  source 1..32: mol_type = other DNA

SEQ ID NO: 28301 - DNA, 32 bp, synthetic construct; identical to SEQ ID NO: 28290
  misc_feature 1..32: note = Synthetic oligonucleotide
  source 1..32: mol_type = other DNA

SEQ ID NO: 28302 - DNA, 33 bp, synthetic construct
  misc_feature 1..33: note = Synthetic oligonucleotide
  source 1..33: mol_type = other DNA
gttgtgaattgctttcaaattttgtagttttgc

SEQ ID NO: 28303 - DNA, 33 bp, synthetic construct
  misc_feature 1..33: note = Synthetic oligonucleotide
  source 1..33: mol_type = other DNA
gttgtgaattgctttcaattttgtatctttgca

SEQ ID NO: 28304 - DNA, 38 bp, synthetic construct
  misc_feature 1..38: note = Synthetic oligonucleotide
  source 1..38: mol_type = other DNA
gttgtgaattgctttcagattgtatctttgataaggga

SEQ ID NO: 28305 - DNA, 31 bp, synthetic construct
  misc_feature 1..31: note = Synthetic oligonucleotide
  source 1..31: mol_type = other DNA
gttgtgaattgctttcattctttgatttaac

SEQ ID NO: 28306 - DNA, 32 bp, synthetic construct
  misc_feature 1..32: note = Synthetic oligonucleotide
  source 1..32: mol_type = other DNA
gttgtgaattgctttcatttttgagtatcttt

SEQ ID NO: 28307 - DNA, 36 bp, synthetic construct
  misc_feature 1..36: note = Synthetic oligonucleotide
  source 1..36: mol_type = other DNA
gttgtgaattgcttttaaattgtatctttgtaaaac

SEQ ID NO: 28308 - DNA, 32 bp, synthetic construct
  misc_feature 1..32: note = Synthetic oligonucleotide
  source 1..32: mol_type = other DNA
gttgtgaattgcttttaaattttgtagttttg

SEQ ID NO: 28309 - DNA, 26 bp, synthetic construct
  misc_feature 1..26: note = Synthetic oligonucleotide
  source 1..26: mol_type = other DNA
gttgtgaattgcttttaaattttgtg

SEQ ID NO: 28310 - DNA, 32 bp, synthetic construct
  misc_feature 1..32: note = Synthetic oligonucleotide
  source 1..32: mol_type = other DNA
gttgtgaattgcttttcaaattttgtagtttt

SEQ ID NO: 28311 - DNA, 36 bp, synthetic construct
  misc_feature 1..36: note = Synthetic oligonucleotide
  source 1..36: mol_type = other DNA
gttgtgaattggctactagagcagatctttgaaagt

SEQ ID NO: 28312 - DNA, 26 bp, synthetic construct
  misc_feature 1..26: note = Synthetic oligonucleotide
  source 1..26: mol_type = other DNA
gttgtgaattggtttcaaattttgta

SEQ ID NO: 28313 - DNA, 28 bp, synthetic construct
  misc_feature 1..28: note = Synthetic oligonucleotide
  source 1..28: mol_type = other DNA
gttgtgacagaactaagttacaattcaa

SEQ ID NO: 28314 - DNA, 36 bp, synthetic construct
  misc_feature 1..36: note = Synthetic oligonucleotide
  source 1..36: mol_type = other DNA
gttgtgacctatagtgtaaaaatacaattttgaaag

SEQ ID NO: 28315 - DNA, 36 bp, synthetic construct
  misc_feature 1..36: note = Synthetic oligonucleotide
  source 1..36: mol_type = other DNA
gttgtgactagcattcaaattgtatcttagctgagg

SEQ ID NO: 28316 - DNA, 36 bp, synthetic construct
  misc_feature 1..36: note = Synthetic oligonucleotide
  source 1..36: mol_type = other DNA
gttgtgactagctttcaaattgtatcttagaagaag

SEQ ID NO: 28317 - DNA, 36 bp, synthetic construct
  misc_feature 1..36: note = Synthetic oligonucleotide
  source 1..36: mol_type = other DNA
gttgtgacttgacctctttttcttctcggctacact

SEQ ID NO: 28318 - DNA, 36 bp, synthetic construct
  misc_feature 1..36: note = Synthetic oligonucleotide
  source 1..36: mol_type = other DNA
gttgtgacttgacctgaatctttccccgtttacagt

SEQ ID NO: 28319 - DNA, 36 bp, synthetic construct
  misc_feature 1..36: note = Synthetic oligonucleotide
  source 1..36: mol_type = other DNA
gttgtgacttgatgcaaaagactgactaaaaacaac

SEQ ID NO: 28320 - DNA, 36 bp, synthetic construct; identical to SEQ ID NO: 13427
  misc_feature 1..36: note = Synthetic oligonucleotide
  source 1..36: mol_type = other DNA

SEQ ID NO: 28321 - DNA, 36 bp, synthetic construct; identical to SEQ ID NO: 13427
  misc_feature 1..36: note = Synthetic oligonucleotide
  source 1..36: mol_type = other DNA

SEQ ID NO: 28322 - DNA, 36 bp, synthetic construct; identical to SEQ ID NO: 13427
  misc_feature 1..36: note = Synthetic oligonucleotide
  source 1..36: mol_type = other DNA

SEQ ID NO: 28323 - DNA, 36 bp, synthetic construct; identical to SEQ ID NO: 13428
  misc_feature 1..36: note = Synthetic oligonucleotide
  source 1..36: mol_type = other DNA

SEQ ID NO: 28324 - DNA, 36 bp, synthetic construct; identical to SEQ ID NO: 13429
  misc_feature 1..36: note = Synthetic oligonucleotide
  source 1..36: mol_type = other DNA

SEQ ID NO: 28325 - DNA, 36 bp, synthetic construct; identical to SEQ ID NO: 13429
  misc_feature 1..36: note = Synthetic oligonucleotide
  source 1..36: mol_type = other DNA

SEQ ID NO: 28326 - DNA, 36 bp, synthetic construct
  misc_feature 1..36: note = Synthetic oligonucleotide
  source 1..36: mol_type = other DNA
gttgtgacttgcggatagaccttagtcggatacaat

SEQ ID NO: 28327 - DNA, 36 bp, synthetic construct; identical to SEQ ID NO: 13435
  misc_feature 1..36: note = Synthetic oligonucleotide
  source 1..36: mol_type = other DNA

SEQ ID NO: 28328 - DNA, 36 bp, synthetic construct; identical to SEQ ID NO: 13435
  misc_feature 1..36: note = Synthetic oligonucleotide
  source 1..36: mol_type = other DNA

SEQ ID NO: 28329 - DNA, 36 bp, synthetic construct; identical to SEQ ID NO: 13439
  misc_feature 1..36: note = Synthetic oligonucleotide
  source 1..36: mol_type = other DNA

SEQ ID NO: 28330 - DNA, 36 bp, synthetic construct
  misc_feature 1..36: note = Synthetic oligonucleotide
  source 1..36: mol_type = other DNA
gttgtgagttgcgacgattttcttatctgctaaact

SEQ ID NO: 28331 - DNA, 34 bp, synthetic construct
  misc_feature 1..34: note = Synthetic oligonucleotide
  source 1..34: mol_type = other DNA
gttgtgagttgctttcaaattcgcaactttgtga

SEQ ID NO: 28332 - DNA, 26 bp, synthetic construct
  misc_feature 1..26: note = Synthetic oligonucleotide
  source 1..26: mol_type = other DNA
gttgtgagttgctttcaaattcgtaa

SEQ ID NO: 28333 - DNA, 32 bp, synthetic construct
  misc_feature 1..32: note = Synthetic oligonucleotide
  source 1..32: mol_type = other DNA
gttgtgagttgctttcaaattcgtaactttgt

SEQ ID NO: 28334 - DNA, 34 bp, synthetic construct; identical to SEQ ID NO: 13444
  misc_feature 1..34: note = Synthetic oligonucleotide
  source 1..34: mol_type = other DNA

SEQ ID NO: 28335 - DNA, 34 bp, synthetic construct; identical to SEQ ID NO: 13444
  misc_feature 1..34: note = Synthetic oligonucleotide
  source 1..34: mol_type = other DNA

SEQ ID NO: 28336 - DNA, 34 bp, synthetic construct; identical to SEQ ID NO: 13444
  misc_feature 1..34: note = Synthetic oligonucleotide
  source 1..34: mol_type = other DNA

SEQ ID NO: 28337 - DNA, 30 bp, synthetic construct
  misc_feature 1..30: note = Synthetic oligonucleotide
  source 1..30: mol_type = other DNA
gttgtgagttgctttcaaattcgtaatttt

SEQ ID NO: 28338 - DNA, 35 bp, synthetic construct
  misc_feature 1..35: note = Synthetic oligonucleotide
  source 1..35: mol_type = other DNA
gttgtgagttgctttcaaattgtatctttgcatag

SEQ ID NO: 28339 - DNA, 27 bp, synthetic construct
  misc_feature 1..27: note = Synthetic oligonucleotide
  source 1..27: mol_type = other DNA
gttgtgagttgctttcaaatttgtaac

SEQ ID NO: 28340 - DNA, 30 bp, synthetic construct
  misc_feature 1..30: note = Synthetic oligonucleotide
  source 1..30: mol_type = other DNA
gttgtgagttgctttcaaatttgtaacttt

SEQ ID NO: 28341 - DNA, 34 bp, synthetic construct
  misc_feature 1..34: note = Synthetic oligonucleotide
  source 1..34: mol_type = other DNA
gttgtgagttgctttcaaatttgtaactttgtga

SEQ ID NO: 28342 - DNA, 34 bp, synthetic construct; identical to SEQ ID NO: 28341
  misc_feature 1..34: note = Synthetic oligonucleotide
  source 1..34: mol_type = other DNA

SEQ ID NO: 28343 - DNA, 36 bp, synthetic construct
  misc_feature 1..36: note = Synthetic oligonucleotide
  source 1..36: mol_type = other DNA
gttgtgagttggttacggacaccggttgattacacc

SEQ ID NO: 28344 - DNA, 36 bp, synthetic construct
  misc_feature 1..36: note = Synthetic oligonucleotide
  source 1..36: mol_type = other DNA
gttgtgagttgtgacgattctcttatctgctaaaat

SEQ ID NO: 28345 - DNA, 37 bp, synthetic construct
  misc_feature 1..37: note = Synthetic oligonucleotide
  source 1..37: mol_type = other DNA
gttgtgagttgttttcaaattcgtaacctcaaacaac

SEQ ID NO: 28346 - DNA, 29 bp, synthetic construct
  misc_feature 1..29: note = Synthetic oligonucleotide
  source 1..29: mol_type = other DNA
gttgtgattagctttcagattccatacct

SEQ ID NO: 28347 - DNA, 24 bp, synthetic construct
  misc_feature 1..24: note = Synthetic oligonucleotide
  source 1..24: mol_type = other DNA
gttgtgattagctttcagattccg

SEQ ID NO: 28348 - DNA, 32 bp, synthetic construct; identical to SEQ ID NO: 13479
  misc_feature 1..32: note = Synthetic oligonucleotide
  source 1..32: mol_type = other DNA

SEQ ID NO: 28349 - DNA, 32 bp, synthetic construct; identical to SEQ ID NO: 13479
  misc_feature 1..32: note = Synthetic oligonucleotide
  source 1..32: mol_type = other DNA

SEQ ID NO: 28350 - DNA, 33 bp, synthetic construct
  misc_feature 1..33: note = Synthetic oligonucleotide
  source 1..33: mol_type = other DNA
gttgtgattagctttcagattccgtaccttcat

SEQ ID NO: 28351 - DNA, 36 bp, synthetic construct
  misc_feature 1..36: note = Synthetic oligonucleotide
  source 1..36: mol_type = other DNA
gttgtgattagttttcagatttcgtaccttcatact

SEQ ID NO: 28352 - DNA, 36 bp, synthetic construct
  misc_feature 1..36: note = Synthetic oligonucleotide
  source 1..36: mol_type = other DNA
gttgtgattcgcgggcaggcatcagtcagttataat

SEQ ID NO: 28353 - DNA, 25 bp, synthetic construct
  misc_feature 1..25: note = Synthetic oligonucleotide
  source 1..25: mol_type = other DNA
gttgtgattcgctttcaaatctgta

SEQ ID NO: 28354 - DNA, 36 bp, synthetic construct; identical to SEQ ID NO: 13493
  misc_feature 1..36: note = Synthetic oligonucleotide
  source 1..36: mol_type = other DNA

SEQ ID NO: 28355 - DNA, 34 bp, synthetic construct
  misc_feature 1..34: note = Synthetic oligonucleotide
  source 1..34: mol_type = other DNA
gttgtgattcgctttcaaatttgtatctttgaca

SEQ ID NO: 28356 - DNA, 36 bp, synthetic construct
  misc_feature 1..36: note = Synthetic oligonucleotide
  source 1..36: mol_type = other DNA
gttgtgattgaatttcaaattgtattttagtacagc

SEQ ID NO: 28357 - DNA, 36 bp, synthetic construct
  misc_feature 1..36: note = Synthetic oligonucleotide
  source 1..36: mol_type = other DNA
gttgtgattggcgggcaaaggccgcttggatacact

SEQ ID NO: 28358 - DNA, 36 bp, synthetic construct
  misc_feature 1..36: note = Synthetic oligonucleotide
  source 1..36: mol_type = other DNA
gttgtgattggctgaaaagactgggcgacttaaatt

SEQ ID NO: 28359 - DNA, 36 bp, synthetic construct
  misc_feature 1..36: note = Synthetic oligonucleotide
  source 1..36: mol_type = other DNA
gttgtgattggctttcaaatcgtatattagcacaac

SEQ ID NO: 28360 - DNA, 36 bp, synthetic construct; identical to SEQ ID NO: 28359
  misc_feature 1..36: note = Synthetic oligonucleotide
  source 1..36: mol_type = other DNA

SEQ ID NO: 28361 - DNA, 36 bp, synthetic construct
  misc_feature 1..36: note = Synthetic oligonucleotide
  source 1..36: mol_type = other DNA
gttgtgatttgaataagatttattatttttgacaac

SEQ ID NO: 28362 - DNA, 36 bp, synthetic construct; identical to SEQ ID NO: 13503
  misc_feature 1..36: note = Synthetic oligonucleotide
  source 1..36: mol_type = other DNA

SEQ ID NO: 28363 - DNA, 36 bp, synthetic construct; identical to SEQ ID NO: 13503
  misc_feature 1..36: note = Synthetic oligonucleotide
  source 1..36: mol_type = other DNA

SEQ ID NO: 28364 - DNA, 36 bp, synthetic construct; identical to SEQ ID NO: 13503
  misc_feature 1..36: note = Synthetic oligonucleotide
  source 1..36: mol_type = other DNA

SEQ ID NO: 28365 - DNA, 36 bp, synthetic construct; identical to SEQ ID NO: 13503
  misc_feature 1..36: note = Synthetic oligonucleotide
  source 1..36: mol_type = other DNA

SEQ ID NO: 28366 - DNA, 36 bp, synthetic construct
  misc_feature 1..36: note = Synthetic oligonucleotide
  source 1..36: mol_type = other DNA
gttgtgatttgacgtaatttgaaggcgggttatatt

SEQ ID NO: 28367 - DNA, 27 bp, synthetic construct
  misc_feature 1..27: note = Synthetic oligonucleotide
  source 1..27: mol_type = other DNA
gttgtgatttgacgtaatttgaaggtg

SEQ ID NO: 28368 - DNA, 36 bp, synthetic construct
  misc_feature 1..36: note = Synthetic oligonucleotide
  source 1..36: mol_type = other DNA
gttgtgatttgacgtaatttgaaggtgagttatatt

SEQ ID NO: 28369 - DNA, 36 bp, synthetic construct; identical to SEQ ID NO: 28368
  misc_feature 1..36: note = Synthetic oligonucleotide
  source 1..36: mol_type = other DNA

SEQ ID NO: 28370 - DNA, 36 bp, synthetic construct
  misc_feature 1..36: note = Synthetic oligonucleotide
  source 1..36: mol_type = other DNA
gttgtgatttgacgtaatttgaaggtgtgttatatt

SEQ ID NO: 28371 - DNA, 36 bp, synthetic construct
  misc_feature 1..36: note = Synthetic oligonucleotide
  source 1..36: mol_type = other DNA
gttgtgatttgagtaagaaatagtacttttggcaac

SEQ ID NO: 28372 - DNA, 36 bp, synthetic construct
  misc_feature 1..36: note = Synthetic oligonucleotide
  source 1..36: mol_type = other DNA
gttgtgatttgatgctctttgactatcgctttcagt

SEQ ID NO: 28373 - DNA, 22 bp, synthetic construct
  misc_feature 1..22: note = Synthetic oligonucleotide
  source 1..22: mol_type = other DNA
gttgtgatttgatggttttcaa

SEQ ID NO: 28374 - DNA, 36 bp, synthetic construct
  misc_feature 1..36: note = Synthetic oligonucleotide
  source 1..36: mol_type = other DNA
gttgtgatttgatggttttcaaggatgtgctatatt

SEQ ID NO: 28375 - DNA, 36 bp, synthetic construct
  misc_feature 1..36: note = Synthetic oligonucleotide
  source 1..36: mol_type = other DNA
gttgtgatttgatgtaatttgaaggtgggttatatt

SEQ ID NO: 28376 - DNA, 36 bp, synthetic construct; identical to SEQ ID NO: 28375
  misc_feature 1..36: note = Synthetic oligonucleotide
  source 1..36: mol_type = other DNA

SEQ ID NO: 28377 - DNA, 36 bp, synthetic construct; identical to SEQ ID NO: 13516
  misc_feature 1..36: note = Synthetic oligonucleotide
  source 1..36: mol_type = other DNA

SEQ ID NO: 28378 - DNA, 36 bp, synthetic construct
  misc_feature 1..36: note = Synthetic oligonucleotide
  source 1..36: mol_type = other DNA
gttgtgatttgatgtagaaattggatactatacaac

SEQ ID NO: 28379 - DNA, 36 bp, synthetic construct; identical to SEQ ID NO: 28378
  misc_feature 1..36: note = Synthetic oligonucleotide
  source 1..36: mol_type = other DNA

SEQ ID NO: 28380 - DNA, 36 bp, synthetic construct; identical to SEQ ID NO: 28378
  misc_feature 1..36: note = Synthetic oligonucleotide
  source 1..36: mol_type = other DNA

SEQ ID NO: 28381 - DNA, 36 bp, synthetic construct; identical to SEQ ID NO: 28378
  misc_feature 1..36: note = Synthetic oligonucleotide
  source 1..36: mol_type = other DNA

SEQ ID NO: 28382 - DNA, 36 bp, synthetic construct; identical to SEQ ID NO: 28378
  misc_feature 1..36: note = Synthetic oligonucleotide
  source 1..36: mol_type = other DNA

SEQ ID NO: 28383 - DNA, 36 bp, synthetic construct; identical to SEQ ID NO: 28378
  misc_feature 1..36: note = Synthetic oligonucleotide
  source 1..36: mol_type = other DNA

SEQ ID NO: 28384 - DNA, 36 bp, synthetic construct; identical to SEQ ID NO: 28378
  misc_feature 1..36: note = Synthetic oligonucleotide
  source 1..36: mol_type = other DNA

SEQ ID NO: 28385 - DNA, 27 bp, synthetic construct
  misc_feature 1..27: note = Synthetic oligonucleotide
  source 1..27: mol_type = other DNA
gttgtgatttgatgttatttgaaggtg

SEQ ID NO: 28386 - DNA, 36 bp, synthetic construct
  misc_feature 1..36: note = Synthetic oligonucleotide
  source 1..36: mol_type = other DNA
gttgtgatttgatgttatttgaaggtgggttatatt

SEQ ID NO: 28387 - DNA, 36 bp, synthetic construct
  misc_feature 1..36: note = Synthetic oligonucleotide
  source 1..36: mol_type = other DNA
gttgtgatttgatgttctttggcgatctgagacact

SEQ ID NO: 28388 - DNA, 36 bp, synthetic construct
  misc_feature 1..36: note = Synthetic oligonucleotide
  source 1..36: mol_type = other DNA
gttgtgatttgatgtttttctgaagtgtgttatatt

SEQ ID NO: 28389 - DNA, 36 bp, synthetic construct
  misc_feature 1..36: note = Synthetic oligonucleotide
  source 1..36: mol_type = other DNA
gttgtgatttgattacaaaaaaggatttgttacatt

SEQ ID NO: 28390 - DNA, 36 bp, synthetic construct
  misc_feature 1..36: note = Synthetic oligonucleotide
  source 1..36: mol_type = other DNA
gttgtgatttgcagataaaccttagtcggttacact

SEQ ID NO: 28391 - DNA, 36 bp, synthetic construct
  misc_feature 1..36: note = Synthetic oligonucleotide
  source 1..36: mol_type = other DNA
gttgtgatttgcagataagccttagtcggttacagt

SEQ ID NO: 28392 - DNA, 36 bp, synthetic construct; identical to SEQ ID NO: 13528
  misc_feature 1..36: note = Synthetic oligonucleotide
  source 1..36: mol_type = other DNA

SEQ ID NO: 28393 - DNA, 36 bp, synthetic construct; identical to SEQ ID NO: 13529
  misc_feature 1..36: note = Synthetic oligonucleotide
  source 1..36: mol_type = other DNA

SEQ ID NO: 28394 - DNA, 36 bp, synthetic construct
  misc_feature 1..36: note = Synthetic oligonucleotide
  source 1..36: mol_type = other DNA
gttgtgatttgcgaatagaccttagtcggttacact

SEQ ID NO: 28395 - DNA, 36 bp, synthetic construct; identical to SEQ ID NO: 28394
  misc_feature 1..36: note = Synthetic oligonucleotide
  source 1..36: mol_type = other DNA

SEQ ID NO: 28396 - DNA, 36 bp, synthetic construct; identical to SEQ ID NO: 13533
  misc_feature 1..36: note = Synthetic oligonucleotide
  source 1..36: mol_type = other DNA

SEQ ID NO: 28397 - DNA, 36 bp, synthetic construct
  misc_feature 1..36: note = Synthetic oligonucleotide
  source 1..36: mol_type = other DNA
gttgtgatttgcgggtaggccttggtcggttacact

SEQ ID NO: 28398 - DNA, 31 bp, synthetic construct
  misc_feature 1..31: note = Synthetic oligonucleotide
  source 1..31: mol_type = other DNA
gttgtgatttgctaaaaaattagtacctttg

SEQ ID NO: 28399 - DNA, 34 bp, synthetic construct
  misc_feature 1..34: note = Synthetic oligonucleotide
  source 1..34: mol_type = other DNA
gttgtgatttgcttacaaaatgtatctttgatag

SEQ ID NO: 28400 - DNA, 34 bp, synthetic construct
  misc_feature 1..34: note = Synthetic oligonucleotide
  source 1..34: mol_type = other DNA
gttgtgatttgcttagaaaattgtatctttgagg

SEQ ID NO: 28401 - DNA, 30 bp, synthetic construct
  misc_feature 1..30: note = Synthetic oligonucleotide
  source 1..30: mol_type = other DNA
gttgtgatttgcttgaaaattattatcttt

SEQ ID NO: 28402 - DNA, 38 bp, synthetic construct
  misc_feature 1..38: note = Synthetic oligonucleotide
  source 1..38: mol_type = other DNA
gttgtgatttgctttcaaaattgtacctttgatatagc

SEQ ID NO: 28403 - DNA, 36 bp, synthetic construct
  misc_feature 1..36: note = Synthetic oligonucleotide
  source 1..36: mol_type = other DNA
gttgtgatttgctttcaacaaacgatctttgacaac

SEQ ID NO: 28404 - DNA, 36 bp, synthetic construct
  misc_feature 1..36: note = Synthetic oligonucleotide
  source 1..36: mol_type = other DNA
gttgtgatttgctttcaacaaacgatctttgataac

SEQ ID NO: 28405 - DNA, 36 bp, synthetic construct; identical to SEQ ID NO: 28404
  misc_feature 1..36: note = Synthetic oligonucleotide
  source 1..36: mol_type = other DNA

SEQ ID NO: 28406 - DNA, 36 bp, synthetic construct
  misc_feature 1..36: note = Synthetic oligonucleotide
  source 1..36: mol_type = other DNA
gttgtgatttgctttcaacagacgatctttgacaac

SEQ ID NO: 28407 - DNA, 36 bp, synthetic construct
  misc_feature 1..36: note = Synthetic oligonucleotide
  source 1..36: mol_type = other DNA
gttgtgatttgctttcaactttagttcttttgcatc

SEQ ID NO: 28408 - DNA, 36 bp, synthetic construct
  misc_feature 1..36: note = Synthetic oligonucleotide
  source 1..36: mol_type = other DNA
gttgtgatttgctttcaattttgttctttgtacatt

SEQ ID NO: 28409 - DNA, 32 bp, synthetic construct
  misc_feature 1..32: note = Synthetic oligonucleotide
  source 1..32: mol_type = other DNA
gttgtgatttgctttcagattttaaaaacgat

SEQ ID NO: 28410 - DNA, 36 bp, synthetic construct
  misc_feature 1..36: note = Synthetic oligonucleotide
  source 1..36: mol_type = other DNA
gttgtgatttgctttcagtaaacgatctttgacatg

SEQ ID NO: 28411 - DNA, 36 bp, synthetic construct
  misc_feature 1..36: note = Synthetic oligonucleotide
  source 1..36: mol_type = other DNA
gttgtgatttgttagcaagattgggtctttgaaatt

SEQ ID NO: 28412 - DNA, 36 bp, synthetic construct; identical to SEQ ID NO: 28411
  misc_feature 1..36: note = Synthetic oligonucleotide
  source 1..36: mol_type = other DNA

SEQ ID NO: 28413 - DNA, 37 bp, synthetic construct
  misc_feature 1..37: note = Synthetic oligonucleotide
  source 1..37: mol_type = other DNA
gttgtgatttgtttctcattttagtatctttaaaaca

SEQ ID NO: 28414 - DNA, 36 bp, synthetic construct
  misc_feature 1..36: note = Synthetic oligonucleotide
  source 1..36: mol_type = other DNA
gttgtgcgctcctgccggctcccgctcgattacact

SEQ ID NO: 28415 - DNA, 36 bp, synthetic construct
  misc_feature 1..36: note = Synthetic oligonucleotide
  source 1..36: mol_type = other DNA
gttgtgctaaagtacaatttgaaagcgattcacaac

SEQ ID NO: 28416 - DNA, 32 bp, synthetic construct
  misc_feature 1..32: note = Synthetic oligonucleotide
  source 1..32: mol_type = other DNA
gttgtgctcaaaaataccgtttcatccatctg

SEQ ID NO: 28417 - DNA, 36 bp, synthetic construct; identical to SEQ ID NO: 13788
  misc_feature 1..36: note = Synthetic oligonucleotide
  source 1..36: mol_type = other DNA

SEQ ID NO: 28418 - DNA, 36 bp, synthetic construct; identical to SEQ ID NO: 13788
  misc_feature 1..36: note = Synthetic oligonucleotide
  source 1..36: mol_type = other DNA

SEQ ID NO: 28419 - DNA, 36 bp, synthetic construct; identical to SEQ ID NO: 13788
  misc_feature 1..36: note = Synthetic oligonucleotide
  source 1..36: mol_type = other DNA

SEQ ID NO: 28420 - DNA, 36 bp, synthetic construct; identical to SEQ ID NO: 13788
  misc_feature 1..36: note = Synthetic oligonucleotide
  source 1..36: mol_type = other DNA

SEQ ID NO: 28421 - DNA, 36 bp, synthetic construct
  misc_feature 1..36: note = Synthetic oligonucleotide
  source 1..36: mol_type = other DNA
gttgtggactgctcccggggacggatcgattacact

SEQ ID NO: 28422 - DNA, 36 bp, synthetic construct
  misc_feature 1..36: note = Synthetic oligonucleotide
  source 1..36: mol_type = other DNA
gttgtggattacaaagattttcgtatctgataaact

SEQ ID NO: 28423 - DNA, 36 bp, synthetic construct
  misc_feature 1..36: note = Synthetic oligonucleotide
  source 1..36: mol_type = other DNA
gttgtggattgacatcaggtcgggattagttacact

SEQ ID NO: 28424 - DNA, 36 bp, synthetic construct; identical to SEQ ID NO: 28423
  misc_feature 1..36: note = Synthetic oligonucleotide
  source 1..36: mol_type = other DNA

SEQ ID NO: 28425 - DNA, 36 bp, synthetic construct
  misc_feature 1..36: note = Synthetic oligonucleotide
  source 1..36: mol_type = other DNA
gttgtggattgacctcaggtcgggattggatacact

SEQ ID NO: 28426 - DNA, 35 bp, synthetic construct
  misc_feature 1..35: note = Synthetic oligonucleotide
  source 1..35: mol_type = other DNA
gttgtggattgataacgaaatcagatctttgaaac

SEQ ID NO: 28427 - DNA, 35 bp, synthetic construct
  misc_feature 1..35: note = Synthetic oligonucleotide
  source 1..35: mol_type = other DNA
gttgtggattgataacgaaatccgatctttgaaac

SEQ ID NO: 28428 - DNA, 36 bp, synthetic construct
  misc_feature 1..36: note = Synthetic oligonucleotide
  source 1..36: mol_type = other DNA
gttgtggattgatcagtttagggaataagagacaac

SEQ ID NO: 28429 - DNA, 36 bp, synthetic construct
  misc_feature 1..36: note = Synthetic oligonucleotide
  source 1..36: mol_type = other DNA
gttgtggattgattaaaaaattggaaaaacgatact

SEQ ID NO: 28430 - DNA, 36 bp, synthetic construct
  misc_feature 1..36: note = Synthetic oligonucleotide
  source 1..36: mol_type = other DNA
gttgtggattgattactttagggaactagatacaac

SEQ ID NO: 28431 - DNA, 36 bp, synthetic construct
  misc_feature 1..36: note = Synthetic oligonucleotide
  source 1..36: mol_type = other DNA
gttgtggattgattgacacttatgatctttgacact

SEQ ID NO: 28432 - DNA, 36 bp, synthetic construct; identical to SEQ ID NO: 28431
  misc_feature 1..36: note = Synthetic oligonucleotide
  source 1..36: mol_type = other DNA

SEQ ID NO: 28433 - DNA, 36 bp, synthetic construct
  misc_feature 1..36: note = Synthetic oligonucleotide
  source 1..36: mol_type = other DNA
gttgtggattgatttcgggccaggatcggttacact

SEQ ID NO: 28434 - DNA, 36 bp, synthetic construct
  misc_feature 1..36: note = Synthetic oligonucleotide
  source 1..36: mol_type = other DNA
gttgtggattgcagatagaccttagtcggttacact

SEQ ID NO: 28435 - DNA, 36 bp, synthetic construct; identical to SEQ ID NO: 13801
  misc_feature 1..36: note = Synthetic oligonucleotide
  source 1..36: mol_type = other DNA

SEQ ID NO: 28436 - DNA, 36 bp, synthetic construct
  misc_feature 1..36: note = Synthetic oligonucleotide
  source 1..36: mol_type = other DNA
gttgtggattgctctcaggccggggtcggttacact

SEQ ID NO: 28437 - DNA, 36 bp, synthetic construct
  misc_feature 1..36: note = Synthetic oligonucleotide
  source 1..36: mol_type = other DNA
gttgtggattggtttcaaatcataggcagatacaac

SEQ ID NO: 28438 - DNA, 36 bp, synthetic construct
  misc_feature 1..36: note = Synthetic oligonucleotide
  source 1..36: mol_type = other DNA
gttgtggctaccatccaaaatcgaacctgctacaat

SEQ ID NO: 28439 - DNA, 36 bp, synthetic construct
  misc_feature 1..36: note = Synthetic oligonucleotide
  source 1..36: mol_type = other DNA
gttgtggcttgacaggaatcgccgctcaggtacact

SEQ ID NO: 28440 - DNA, 36 bp, synthetic construct
  misc_feature 1..36: note = Synthetic oligonucleotide
  source 1..36: mol_type = other DNA
gttgtggcttgatgcaaaaaatggactaaaaacaac

SEQ ID NO: 28441 - DNA, 36 bp, synthetic construct; identical to SEQ ID NO: 13817
  misc_feature 1..36: note = Synthetic oligonucleotide
  source 1..36: mol_type = other DNA

SEQ ID NO: 28442 - DNA, 36 bp, synthetic construct; identical to SEQ ID NO: 13817
  misc_feature 1..36: note = Synthetic oligonucleotide
  source 1..36: mol_type = other DNA

SEQ ID NO: 28443 - DNA, 36 bp, synthetic construct; identical to SEQ ID NO: 13821
  misc_feature 1..36: note = Synthetic oligonucleotide
  source 1..36: mol_type = other DNA

SEQ ID NO: 28444 - DNA, 36 bp, synthetic construct; identical to SEQ ID NO: 13822
  misc_feature 1..36: note = Synthetic oligonucleotide
  source 1..36: mol_type = other DNA

SEQ ID NO: 28445 - DNA, 36 bp, synthetic construct
  misc_feature 1..36: note = Synthetic oligonucleotide
  source 1..36: mol_type = other DNA
gttgtggcttgcactcggacgcggatcagttataat

SEQ ID NO: 28446 - DNA, 36 bp, synthetic construct
  misc_feature 1..36: note = Synthetic oligonucleotide
  source 1..36: mol_type = other DNA
gttgtggcttgcagcaggatctcgatcagctagaat

SEQ ID NO: 28447 - DNA, 36 bp, synthetic construct
  misc_feature 1..36: note = Synthetic oligonucleotide
  source 1..36: mol_type = other DNA
gttgtggcttgcgggcaggcatcgatcagctaaaat

SEQ ID NO: 28448 - DNA, 36 bp, synthetic construct
  misc_feature 1..36: note = Synthetic oligonucleotide
  source 1..36: mol_type = other DNA
gttgtggcttgctctcagacaaatatagattacaat

SEQ ID NO: 28449 - DNA, 36 bp, synthetic construct
  misc_feature 1..36: note = Synthetic oligonucleotide
  source 1..36: mol_type = other DNA
gttgtggcttgctctcagacgcggattagttacaat

SEQ ID NO: 28450 - DNA, 36 bp, synthetic construct; identical to SEQ ID NO: 13825
  misc_feature 1..36: note = Synthetic oligonucleotide
  source 1..36: mol_type = other DNA

SEQ ID NO: 28451 - DNA, 36 bp, synthetic construct; identical to SEQ ID NO: 13825
  misc_feature 1..36: note = Synthetic oligonucleotide
  source 1..36: mol_type = other DNA

SEQ ID NO: 28452 - DNA, 36 bp, synthetic construct
  misc_feature 1..36: note = Synthetic oligonucleotide
  source 1..36: mol_type = other DNA
gttgtggcttgctctcaggcataggtcagttacaat

SEQ ID NO: 28453 - DNA, 36 bp, synthetic construct; identical to SEQ ID NO: 28452
  misc_feature 1..36: note = Synthetic oligonucleotide
  source 1..36: mol_type = other DNA

SEQ ID NO: 28454 - DNA, 36 bp, synthetic construct; identical to SEQ ID NO: 28452
  misc_feature 1..36: note = Synthetic oligonucleotide
  source 1..36: mol_type = other DNA

SEQ ID NO: 28455 - DNA, 36 bp, synthetic construct; identical to SEQ ID NO: 28452
  misc_feature 1..36: note = Synthetic oligonucleotide
  source 1..36: mol_type = other DNA

SEQ ID NO: 28456 - DNA, 36 bp, synthetic construct; identical to SEQ ID NO: 28452
  misc_feature 1..36: note = Synthetic oligonucleotide
  source 1..36: mol_type = other DNA

SEQ ID NO: 28457 - DNA, 36 bp, synthetic construct
  misc_feature 1..36: note = Synthetic oligonucleotide
  source 1..36: mol_type = other DNA
gttgtggcttgctctcaggcataggtcagttataat

SEQ ID NO: 28458 - DNA, 36 bp, synthetic construct; identical to SEQ ID NO: 28457
  misc_feature 1..36: note = Synthetic oligonucleotide
  source 1..36: mol_type = other DNA

SEQ ID NO: 28459 - DNA, 36 bp, synthetic construct
  misc_feature 1..36: note = Synthetic oligonucleotide
  source 1..36: mol_type = other DNA
gttgtggcttgctctcagggaccggtcagttacaat

SEQ ID NO: 28460 - DNA, 36 bp, synthetic construct
  misc_feature 1..36: note = Synthetic oligonucleotide
  source 1..36: mol_type = other DNA
gttgtggcttgctgacgaagagaaaagagatacaac

SEQ ID NO: 28461 - DNA, 36 bp, synthetic construct
  misc_feature 1..36: note = Synthetic oligonucleotide
  source 1..36: mol_type = other DNA
gttgtggcttgctttcaggcacggatcaattacaat

SEQ ID NO: 28462 - DNA, 36 bp, synthetic construct; identical to SEQ ID NO: 13833
  misc_feature 1..36: note = Synthetic oligonucleotide
  source 1..36: mol_type = other DNA

SEQ ID NO: 28463 - DNA, 36 bp, synthetic construct
  misc_feature 1..36: note = Synthetic oligonucleotide
  source 1..36: mol_type = other DNA
gttgtgggttgcggacaggcgccagtcagttacact

SEQ ID NO: 28464 - DNA, 36 bp, synthetic construct
  misc_feature 1..36: note = Synthetic oligonucleotide
  source 1..36: mol_type = other DNA
gttgtggtaggcaatcaacagctgcttcgatacact

SEQ ID NO: 28465 - DNA, 36 bp, synthetic construct
  misc_feature 1..36: note = Synthetic oligonucleotide
  source 1..36: mol_type = other DNA
gttgtggtctgatgtagaacattgataagatacaac

SEQ ID NO: 28466 - DNA, 36 bp, synthetic construct; identical to SEQ ID NO: 28465
  misc_feature 1..36: note = Synthetic oligonucleotide
  source 1..36: mol_type = other DNA

SEQ ID NO: 28467 - DNA, 36 bp, synthetic construct; identical to SEQ ID NO: 13839
  misc_feature 1..36: note = Synthetic oligonucleotide
  source 1..36: mol_type = other DNA

SEQ ID NO: 28468 - DNA, 36 bp, synthetic construct; identical to SEQ ID NO: 13839
  misc_feature 1..36: note = Synthetic oligonucleotide
  source 1..36: mol_type = other DNA

SEQ ID NO: 28469 - DNA, 36 bp, synthetic construct; identical to SEQ ID NO: 13839
  misc_feature 1..36: note = Synthetic oligonucleotide
  source 1..36: mol_type = other DNA

SEQ ID NO: 28470 - DNA, 36 bp, synthetic construct
  misc_feature 1..36: note = Synthetic oligonucleotide
  source 1..36: mol_type = other DNA
gttgtggttccctaacagttcttggtatggtataat

SEQ ID NO: 28471 - DNA, 36 bp, synthetic construct
  misc_feature 1..36: note = Synthetic oligonucleotide
  source 1..36: mol_type = other DNA
gttgtggtttgaatctaatgttcgataagatatacc

SEQ ID NO: 28472 - DNA, 36 bp, synthetic construct
  misc_feature 1..36: note = Synthetic oligonucleotide
  source 1..36: mol_type = other DNA
gttgtggtttgataaaaaaaagctcattgacatact

SEQ ID NO: 28473 - DNA, 36 bp, synthetic construct
  misc_feature 1..36: note = Synthetic oligonucleotide
  source 1..36: mol_type = other DNA
gttgtggtttgataagaaattggaatagaagacatt

SEQ ID NO: 28474 - DNA, 36 bp, synthetic construct; identical to SEQ ID NO: 28473
  misc_feature 1..36: note = Synthetic oligonucleotide
  source 1..36: mol_type = other DNA

SEQ ID NO: 28475 - DNA, 36 bp, synthetic construct; identical to SEQ ID NO: 28473
  misc_feature 1..36: note = Synthetic oligonucleotide
  source 1..36: mol_type = other DNA

SEQ ID NO: 28476 - DNA, 36 bp, synthetic construct
  misc_feature 1..36: note = Synthetic oligonucleotide
  source 1..36: mol_type = other DNA
gttgtggtttgatcgcagaaagctcttttacatact

SEQ ID NO: 28477 - DNA, 36 bp, synthetic construct
  misc_feature 1..36: note = Synthetic oligonucleotide
  source 1..36: mol_type = other DNA
gttgtggtttgatgtaaaaatggaacgatattcaac

SEQ ID NO: 28478 - DNA, 36 bp, synthetic construct; identical to SEQ ID NO: 28477
  misc_feature 1..36: note = Synthetic oligonucleotide
  source 1..36: mol_type = other DNA

SEQ ID NO: 28479 - DNA, 36 bp, synthetic construct; identical to SEQ ID NO: 13859
  misc_feature 1..36: note = Synthetic oligonucleotide
  source 1..36: mol_type = other DNA

SEQ ID NO: 28480 - DNA, 36 bp, synthetic construct
  misc_feature 1..36: note = Synthetic oligonucleotide
  source 1..36: mol_type = other DNA
gttgtggtttgatgtaaaattgaaatgatattcaac

SEQ ID NO: 28481 - DNA, 36 bp, synthetic construct
  misc_feature 1..36: note = Synthetic oligonucleotide
  source 1..36: mol_type = other DNA
gttgtggtttgatgtaaaattgaaatgatattcacc

SEQ ID NO: 28482 - DNA, 36 bp, synthetic construct; identical to SEQ ID NO: 28481
  misc_feature 1..36: note = Synthetic oligonucleotide
  source 1..36: mol_type = other DNA

SEQ ID NO: 28483 - DNA, 36 bp, synthetic construct; identical to SEQ ID NO: 28481
  misc_feature 1..36: note = Synthetic oligonucleotide
  source 1..36: mol_type = other DNA

SEQ ID NO: 28484 - DNA, 36 bp, synthetic construct
  misc_feature 1..36: note = Synthetic oligonucleotide
  source 1..36: mol_type = other DNA
gttgtggtttgatgtaatttaaggactttaagaaac

SEQ ID NO: 28485 - DNA, 37 bp, synthetic construct
  misc_feature 1..37: note = Synthetic oligonucleotide
  source 1..37: mol_type = other DNA
gttgtggtttgatgtaatttcaagatcataaaaaact

SEQ ID NO: 28486 - DNA, 36 bp, synthetic construct; identical to SEQ ID NO: 13865
  misc_feature 1..36: note = Synthetic oligonucleotide
  source 1..36: mol_type = other DNA

SEQ ID NO: 28487 - DNA, 36 bp, synthetic construct
  misc_feature 1..36: note = Synthetic oligonucleotide
  source 1..36: mol_type = other DNA
gttgtggtttgatgtaattttcaaaggatattcagc

SEQ ID NO: 28488 - DNA, 36 bp, synthetic construct
  misc_feature 1..36: note = Synthetic oligonucleotide
  source 1..36: mol_type = other DNA
gttgtggtttgatgtaattttggaacacacaacaac

SEQ ID NO: 28489 - DNA, 36 bp, synthetic construct
  misc_feature 1..36: note = Synthetic oligonucleotide
  source 1..36: mol_type = other DNA
gttgtggtttgatgtaattttggaactcataacaac

SEQ ID NO: 28490 - DNA, 36 bp, synthetic construct
  misc_feature 1..36: note = Synthetic oligonucleotide
  source 1..36: mol_type = other DNA
gttgtggtttgatgtagaaaaacgatataatacaac

SEQ ID NO: 28491 - DNA, 36 bp, synthetic construct; identical to SEQ ID NO: 28490
  misc_feature 1..36: note = Synthetic oligonucleotide
  source 1..36: mol_type = other DNA

SEQ ID NO: 28492 - DNA, 36 bp, synthetic construct; identical to SEQ ID NO: 28490
  misc_feature 1..36: note = Synthetic oligonucleotide
  source 1..36: mol_type = other DNA

SEQ ID NO: 28493 - DNA, 36 bp, synthetic construct
  misc_feature 1..36: note = Synthetic oligonucleotide
  source 1..36: mol_type = other DNA
gttgtggtttgatgtagaaaaaggatgatatacaat

SEQ ID NO: 28494 - DNA, 36 bp, synthetic construct
  misc_feature 1..36: note = Synthetic oligonucleotide
  source 1..36: mol_type = other DNA
gttgtggtttgatgtagaaaacagatataagacaac

SEQ ID NO: 28495 - DNA, 36 bp, synthetic construct
  misc_feature 1..36: note = Synthetic oligonucleotide
  source 1..36: mol_type = other DNA
gttgtggtttgatgtagaaaagaagtataagacaat

SEQ ID NO: 28496 - DNA, 36 bp, synthetic construct
  misc_feature 1..36: note = Synthetic oligonucleotide
  source 1..36: mol_type = other DNA
gttgtggtttgatgtagaaaagacataatagacaac

SEQ ID NO: 28497 - DNA, 36 bp, synthetic construct; identical to SEQ ID NO: 13873
  misc_feature 1..36: note = Synthetic oligonucleotide
  source 1..36: mol_type = other DNA

SEQ ID NO: 28498 - DNA, 36 bp, synthetic construct
  misc_feature 1..36: note = Synthetic oligonucleotide
  source 1..36: mol_type = other DNA
gttgtggtttgatgtagaaaagagataaaagacaat

SEQ ID NO: 28499 - DNA, 36 bp, synthetic construct
  misc_feature 1..36: note = Synthetic oligonucleotide
  source 1..36: mol_type = other DNA
gttgtggtttgatgtagaaaagagatataagacaat

SEQ ID NO: 28500 - DNA, 36 bp, synthetic construct
  misc_feature 1..36: note = Synthetic oligonucleotide
  source 1..36: mol_type = other DNA
gttgtggtttgatgtagaaaattgataagatacaac

SEQ ID NO: 28501 - DNA, 36 bp, synthetic construct; identical to SEQ ID NO: 28500
  misc_feature 1..36: note = Synthetic oligonucleotide
  source 1..36: mol_type = other DNA

SEQ ID NO: 28502 - DNA, 36 bp, synthetic construct; identical to SEQ ID NO: 28500
  misc_feature 1..36: note = Synthetic oligonucleotide
  source 1..36: mol_type = other DNA

SEQ ID NO: 28503 - DNA, 36 bp, synthetic construct; identical to SEQ ID NO: 28500
  misc_feature 1..36: note = Synthetic oligonucleotide
  source 1..36: mol_type = other DNA

SEQ ID NO: 28504 - DNA, 36 bp, synthetic construct; identical to SEQ ID NO: 28500
  misc_feature 1..36: note = Synthetic oligonucleotide
  source 1..36: mol_type = other DNA

SEQ ID NO: 28505 - DNA, 34 bp, synthetic construct
  misc_feature 1..34: note = Synthetic oligonucleotide
  source 1..34: mol_type = other DNA
gttgtggtttgatgtagaaacaagatataagaca

SEQ ID NO: 28506 - DNA, 36 bp, synthetic construct; identical to SEQ ID NO: 13876
  misc_feature 1..36: note = Synthetic oligonucleotide
  source 1..36: mol_type = other DNA

SEQ ID NO: 28507 - DNA, 36 bp, synthetic construct; identical to SEQ ID NO: 13876
  misc_feature 1..36: note = Synthetic oligonucleotide
  source 1..36: mol_type = other DNA

SEQ ID NO: 28508 - DNA, 36 bp, synthetic construct; identical to SEQ ID NO: 13876
  misc_feature 1..36: note = Synthetic oligonucleotide
  source 1..36: mol_type = other DNA

SEQ ID NO: 28509 - DNA, 36 bp, synthetic construct
  misc_feature 1..36: note = Synthetic oligonucleotide
  source 1..36: mol_type = other DNA
gttgtggtttgatgtagaaataaagtgaattgcaac

SEQ ID NO: 28510 - DNA, 36 bp, synthetic construct; identical to SEQ ID NO: 28509
  misc_feature 1..36: note = Synthetic oligonucleotide
  source 1..36: mol_type = other DNA

SEQ ID NO: 28511 - DNA, 36 bp, synthetic construct
  misc_feature 1..36: note = Synthetic oligonucleotide
  source 1..36: mol_type = other DNA
gttgtggtttgatgtagaaatagaataagacacaac

SEQ ID NO: 28512 - DNA, 36 bp, synthetic construct
  misc_feature 1..36: note = Synthetic oligonucleotide
  source 1..36: mol_type = other DNA
gttgtggtttgatgtagaaatagaatgaattacaac

SEQ ID NO: 28513 - DNA, 36 bp, synthetic construct; identical to SEQ ID NO: 28512
  misc_feature 1..36: note = Synthetic oligonucleotide
  source 1..36: mol_type = other DNA

SEQ ID NO: 28514 - DNA, 36 bp, synthetic construct; identical to SEQ ID NO: 28512
  misc_feature 1..36: note = Synthetic oligonucleotide
  source 1..36: mol_type = other DNA

SEQ ID NO: 28515 - DNA, 36 bp, synthetic construct; identical to SEQ ID NO: 28512
  misc_feature 1..36: note = Synthetic oligonucleotide
  source 1..36: mol_type = other DNA

SEQ ID NO: 28516 - DNA, 36 bp, synthetic construct; identical to SEQ ID NO: 28512
  misc_feature 1..36: note = Synthetic oligonucleotide
  source 1..36: mol_type = other DNA

SEQ ID NO: 28517 - DNA, 36 bp, synthetic construct; identical to SEQ ID NO: 28512
  misc_feature 1..36: note = Synthetic oligonucleotide
  source 1..36: mol_type = other DNA

SEQ ID NO: 28518 - DNA, 36 bp, synthetic construct; identical to SEQ ID NO: 28512
  misc_feature 1..36: note = Synthetic oligonucleotide
  source 1..36: mol_type = other DNA

SEQ ID NO: 28519 - DNA, 36 bp, synthetic construct; identical to SEQ ID NO: 28512
  misc_feature 1..36: note = Synthetic oligonucleotide
  source 1..36: mol_type = other DNA

SEQ ID NO: 28520 - DNA, 36 bp, synthetic construct; identical to SEQ ID NO: 13879
  misc_feature 1..36: note = Synthetic oligonucleotide
  source 1..36: mol_type = other DNA

SEQ ID NO: 28521 - DNA, 36 bp, synthetic construct; identical to SEQ ID NO: 13879
  misc_feature 1..36: note = Synthetic oligonucleotide
  source 1..36: mol_type = other DNA

SEQ ID NO: 28522 - DNA, 36 bp, synthetic construct; identical to SEQ ID NO: 13879
  misc_feature 1..36: note = Synthetic oligonucleotide
  source 1..36: mol_type = other DNA

SEQ ID NO: 28523 - DNA, 36 bp, synthetic construct; identical to SEQ ID NO: 13880
  misc_feature 1..36: note = Synthetic oligonucleotide
  source 1..36: mol_type = other DNA

SEQ ID NO: 28524 - DNA, 36 bp, synthetic construct; identical to SEQ ID NO: 13880
  misc_feature 1..36: note = Synthetic oligonucleotide
  source 1..36: mol_type = other DNA

SEQ ID NO: 28525 - DNA, 36 bp, synthetic construct; identical to SEQ ID NO: 13880
  misc_feature 1..36: note = Synthetic oligonucleotide
  source 1..36: mol_type = other DNA

SEQ ID NO: 28526 - DNA, 36 bp, synthetic construct; identical to SEQ ID NO: 13880
  misc_feature 1..36: note = Synthetic oligonucleotide
  source 1..36: mol_type = other DNA

SEQ ID NO: 28527 - DNA, 36 bp, synthetic construct; identical to SEQ ID NO: 13880
  misc_feature 1..36: note = Synthetic oligonucleotide
  source 1..36: mol_type = other DNA

SEQ ID NO: 28528 - DNA, 36 bp, synthetic construct; identical to SEQ ID NO: 13880
  misc_feature 1..36: note = Synthetic oligonucleotide
  source 1..36: mol_type = other DNA

SEQ ID NO: 28529 - DNA, 36 bp, synthetic construct; identical to SEQ ID NO: 13881
  misc_feature 1..36: note = Synthetic oligonucleotide
  source 1..36: mol_type = other DNA

SEQ ID NO: 28530 - DNA, 36 bp, synthetic construct; identical to SEQ ID NO: 13881
  misc_feature 1..36: note = Synthetic oligonucleotide
  source 1..36: mol_type = other DNA

SEQ ID NO: 28531 - DNA, 36 bp, synthetic construct; identical to SEQ ID NO: 13881
  misc_feature 1..36: note = Synthetic oligonucleotide
  source 1..36: mol_type = other DNA

SEQ ID NO: 28532 - DNA, 36 bp, synthetic construct; identical to SEQ ID NO: 13881
  misc_feature 1..36: note = Synthetic oligonucleotide
  source 1..36: mol_type = other DNA

SEQ ID NO: 28533 - DNA, 36 bp, synthetic construct; identical to SEQ ID NO: 13881
  misc_feature 1..36: note = Synthetic oligonucleotide
  source 1..36: mol_type = other DNA

SEQ ID NO: 28534 - DNA, 36 bp, synthetic construct; identical to SEQ ID NO: 13881
  misc_feature 1..36: note = Synthetic oligonucleotide
  source 1..36: mol_type = other DNA

SEQ ID NO: 28535 - DNA, 36 bp, synthetic construct
  misc_feature 1..36: note = Synthetic oligonucleotide
  source 1..36: mol_type = other DNA
gttgtggtttgatgtagaaatttgataggatacaac

SEQ ID NO: 28536 - DNA, 36 bp, synthetic construct; identical to SEQ ID NO: 13883
  misc_feature 1..36: note = Synthetic oligonucleotide
  source 1..36: mol_type = other DNA

SEQ ID NO: 28537 - DNA, 36 bp, synthetic construct
  misc_feature 1..36: note = Synthetic oligonucleotide
  source 1..36: mol_type = other DNA
gttgtggtttgatgtagaacagagatataagacaac

SEQ ID NO: 28538 - DNA, 36 bp, synthetic construct; identical to SEQ ID NO: 28537
  misc_feature 1..36: note = Synthetic oligonucleotide
  source 1..36: mol_type = other DNA

SEQ ID NO: 28539 - DNA, 36 bp, synthetic construct
  misc_feature 1..36: note = Synthetic oligonucleotide
  source 1..36: mol_type = other DNA
gttgtggtttgatgtagaacagagatataagacaat

SEQ ID NO: 28540 - DNA, 36 bp, synthetic construct
  misc_feature 1..36: note = Synthetic oligonucleotide
  source 1..36: mol_type = other DNA
gttgtggtttgatgtagaagaaagatataacacaac

SEQ ID NO: 28541 - DNA, 36 bp, synthetic construct; identical to SEQ ID NO: 28540
  misc_feature 1..36: note = Synthetic oligonucleotide
  source 1..36: mol_type = other DNA

SEQ ID NO: 28542 - DNA, 36 bp, synthetic construct; identical to SEQ ID NO: 28540
  misc_feature 1..36: note = Synthetic oligonucleotide
  source 1..36: mol_type = other DNA

SEQ ID NO: 28543 - DNA, 36 bp, synthetic construct; identical to SEQ ID NO: 28540
  misc_feature 1..36: note = Synthetic oligonucleotide
  source 1..36: mol_type = other DNA

SEQ ID NO: 28544 - DNA, 36 bp, synthetic construct
  misc_feature 1..36: note = Synthetic oligonucleotide
  source 1..36: mol_type = other DNA
gttgtggtttgatgtagaagaaagatataacgcaac

SEQ ID NO: 28545 - DNA, 36 bp, synthetic construct; identical to SEQ ID NO: 28544
  misc_feature 1..36: note = Synthetic oligonucleotide
  source 1..36: mol_type = other DNA

SEQ ID NO: 28546 - DNA, 36 bp, synthetic construct
  misc_feature 1..36: note = Synthetic oligonucleotide
  source 1..36: mol_type = other DNA
gttgtggtttgatgtagaagaaggataaaagacaat

SEQ ID NO: 28547 - DNA, 36 bp, synthetic construct
  misc_feature 1..36: note = Synthetic oligonucleotide
  source 1..36: mol_type = other DNA
gttgtggtttgatgtagaagaatgataaaagacaac

SEQ ID NO: 28548 - DNA, 36 bp, synthetic construct
  misc_feature 1..36: note = Synthetic oligonucleotide
  source 1..36: mol_type = other DNA
gttgtggtttgatgtagaagtaagatataacacaac

SEQ ID NO: 28549 - DNA, 36 bp, synthetic construct
  misc_feature 1..36: note = Synthetic oligonucleotide
  source 1..36: mol_type = other DNA
gttgtggtttgatgtagaataacgatataatgcaac

SEQ ID NO: 28550 - DNA, 36 bp, synthetic construct
  misc_feature 1..36: note = Synthetic oligonucleotide
  source 1..36: mol_type = other DNA
gttgtggtttgatgtagaataaggaagatttacaac

SEQ ID NO: 28551 - DNA, 36 bp, synthetic construct
  misc_feature 1..36: note = Synthetic oligonucleotide
  source 1..36: mol_type = other DNA
gttgtggtttgatgtagaatagataggaagaacaac

SEQ ID NO: 28552 - DNA, 36 bp, synthetic construct
  misc_feature 1..36: note = Synthetic oligonucleotide
  source 1..36: mol_type = other DNA
gttgtggtttgatgtagaatcaaaatatgaagcaac

SEQ ID NO: 28553 - DNA, 36 bp, synthetic construct
  misc_feature 1..36: note = Synthetic oligonucleotide
  source 1..36: mol_type = other DNA
gttgtggtttgatgtagaatcaagatataaagcaac

SEQ ID NO: 28554 - DNA, 36 bp, synthetic construct; identical to SEQ ID NO: 13889
  misc_feature 1..36: note = Synthetic oligonucleotide
  source 1..36: mol_type = other DNA

SEQ ID NO: 28555 - DNA, 36 bp, synthetic construct; identical to SEQ ID NO: 13889
  misc_feature 1..36: note = Synthetic oligonucleotide
  source 1..36: mol_type = other DNA

SEQ ID NO: 28556 - DNA, 36 bp, synthetic construct; identical to SEQ ID NO: 13889
  misc_feature 1..36: note = Synthetic oligonucleotide
  source 1..36: mol_type = other DNA

SEQ ID NO: 28557 - DNA, 36 bp, synthetic construct; identical to SEQ ID NO: 13889
  misc_feature 1..36: note = Synthetic oligonucleotide
  source 1..36: mol_type = other DNA

SEQ ID NO: 28558 - DNA, 36 bp, synthetic construct; identical to SEQ ID NO: 13889
  misc_feature 1..36: note = Synthetic oligonucleotide
  source 1..36: mol_type = other DNA

SEQ ID NO: 28559 - DNA, 36 bp, synthetic construct; identical to SEQ ID NO: 13889
  misc_feature 1..36: note = Synthetic oligonucleotide
  source 1..36: mol_type = other DNA

SEQ ID NO: 28560 - DNA, 29 bp, synthetic construct
  misc_feature 1..29: note = Synthetic oligonucleotide
  source 1..29: mol_type = other DNA
gttgtggtttgatgtagaattggaatgag

SEQ ID NO: 28561 - DNA, 29 bp, synthetic construct
  misc_feature 1..29: note = Synthetic oligonucleotide
  source 1..29: mol_type = other DNA
gttgtggtttgatgtagaattggaatgag

SEQ ID NO: 28562 - DNA, 29 bp, synthetic construct
  misc_feature 1..29: note = Synthetic oligonucleotide
  source 1..29: mol_type = other DNA
gttgtggtttgatgtagaattggaatgag

SEQ ID NO: 28563 - DNA, 29 bp, synthetic construct
  misc_feature 1..29: note = Synthetic oligonucleotide
  source 1..29: mol_type = other DNA
gttgtggtttgatgtagaattggaatgag

SEQ ID NO: 28564 - DNA, 36 bp, synthetic construct
  misc_feature 1..36: note = Synthetic oligonucleotide
  source 1..36: mol_type = other DNA
gttgtggtttgatgtagaattggaatgagaaacaac

SEQ ID NO: 28565 - DNA, 36 bp, synthetic construct; identical to SEQ ID NO: 28564
  misc_feature 1..36: note = Synthetic oligonucleotide
  source 1..36: mol_type = other DNA

SEQ ID NO: 28566 - DNA, 36 bp, synthetic construct; identical to SEQ ID NO: 28564
  misc_feature 1..36: note = Synthetic oligonucleotide
  source 1..36: mol_type = other DNA

SEQ ID NO: 28567 - DNA, 36 bp, synthetic construct; identical to SEQ ID NO: 28564
  misc_feature 1..36: note = Synthetic oligonucleotide
  source 1..36: mol_type = other DNA

SEQ ID NO: 28568 - DNA, 36 bp, synthetic construct; identical to SEQ ID NO: 28564
  misc_feature 1..36: note = Synthetic oligonucleotide
  source 1..36: mol_type = other DNA

SEQ ID NO: 28569 - DNA, 36 bp, synthetic construct; identical to SEQ ID NO: 28564
  misc_feature 1..36: note = Synthetic oligonucleotide
  source 1..36: mol_type = other DNA

SEQ ID NO: 28570 - DNA, 36 bp, synthetic construct; identical to SEQ ID NO: 13892
  misc_feature 1..36: note = Synthetic oligonucleotide
  source 1..36: mol_type = other DNA

SEQ ID NO: 28571 - DNA, 36 bp, synthetic construct; identical to SEQ ID NO: 13892
  misc_feature 1..36: note = Synthetic oligonucleotide
  source 1..36: mol_type = other DNA

SEQ ID NO: 28572 - DNA, 36 bp, synthetic construct; identical to SEQ ID NO: 13892
  misc_feature 1..36: note = Synthetic oligonucleotide
  source 1..36: mol_type = other DNA

SEQ ID NO: 28573 - DNA, 36 bp, synthetic construct; identical to SEQ ID NO: 13892
  misc_feature 1..36: note = Synthetic oligonucleotide
  source 1..36: mol_type = other DNA

SEQ ID NO: 28574 - DNA, 36 bp, synthetic construct; identical to SEQ ID NO: 13892
  misc_feature 1..36: note = Synthetic oligonucleotide
  source 1..36: mol_type = other DNA

SEQ ID NO: 28575 - DNA, 36 bp, synthetic construct; identical to SEQ ID NO: 13892
  misc_feature 1..36: note = Synthetic oligonucleotide
  source 1..36: mol_type = other DNA

SEQ ID NO: 28576 - DNA, 23 bp, synthetic construct
  misc_feature 1..23: note = Synthetic oligonucleotide
  source 1..23: mol_type = other DNA
gttgtggtttgatgtagaatttc

SEQ ID NO: 28577 - DNA, 36 bp, synthetic construct; identical to SEQ ID NO: 13893
  misc_feature 1..36: note = Synthetic oligonucleotide
  source 1..36: mol_type = other DNA

SEQ ID NO: 28578 - DNA, 36 bp, synthetic construct; identical to SEQ ID NO: 13893
  misc_feature 1..36: note = Synthetic oligonucleotide
  source 1..36: mol_type = other DNA

SEQ ID NO: 28579 - DNA, 36 bp, synthetic construct; identical to SEQ ID NO: 13893
  misc_feature 1..36: note = Synthetic oligonucleotide
  source 1..36: mol_type = other DNA

SEQ ID NO: 28580 - DNA, 36 bp, synthetic construct; identical to SEQ ID NO: 13893
  misc_feature 1..36: note = Synthetic oligonucleotide
  source 1..36: mol_type = other DNA

SEQ ID NO: 28581 - DNA, 36 bp, synthetic construct; identical to SEQ ID NO: 13893
  misc_feature 1..36: note = Synthetic oligonucleotide
  source 1..36: mol_type = other DNA

SEQ ID NO: 28582 - DNA, 36 bp, synthetic construct; identical to SEQ ID NO: 13893
  misc_feature 1..36: note = Synthetic oligonucleotide
  source 1..36: mol_type = other DNA

SEQ ID NO: 28583 - DNA, 36 bp, synthetic construct; identical to SEQ ID NO: 13893
  misc_feature 1..36: note = Synthetic oligonucleotide
  source 1..36: mol_type = other DNA

SEQ ID NO: 28584 - DNA, 36 bp, synthetic construct; identical to SEQ ID NO: 13893
  misc_feature 1..36: note = Synthetic oligonucleotide
  source 1..36: mol_type = other DNA

SEQ ID NO: 28585 - DNA, 36 bp, synthetic construct; identical to SEQ ID NO: 13893
  misc_feature 1..36: note = Synthetic oligonucleotide
  source 1..36: mol_type = other DNA

SEQ ID NO: 28586 - DNA, 36 bp, synthetic construct; identical to SEQ ID NO: 13893
  misc_feature 1..36: note = Synthetic oligonucleotide
  source 1..36: mol_type = other DNA

SEQ ID NO: 28587 - DNA, 36 bp, synthetic construct; identical to SEQ ID NO: 13893
  misc_feature 1..36: note = Synthetic oligonucleotide
  source 1..36: mol_type = other DNA

SEQ ID NO: 28588 - DNA, 36 bp, synthetic construct; identical to SEQ ID NO: 13893
  misc_feature 1..36: note = Synthetic oligonucleotide
  source 1..36: mol_type = other DNA

SEQ ID NO: 28589 - DNA, 36 bp, synthetic construct; identical to SEQ ID NO: 13893
  misc_feature 1..36: note = Synthetic oligonucleotide
  source 1..36: mol_type = other DNA

SEQ ID NO: 28590 - DNA, 36 bp, synthetic construct; identical to SEQ ID NO: 13893
  misc_feature 1..36: note = Synthetic oligonucleotide
  source 1..36: mol_type = other DNA

SEQ ID NO: 28591 - DNA, 36 bp, synthetic construct; identical to SEQ ID NO: 13893
  misc_feature 1..36: note = Synthetic oligonucleotide
  source 1..36: mol_type = other DNA

SEQ ID NO: 28592 - DNA, 36 bp, synthetic construct; identical to SEQ ID NO: 13893
  misc_feature 1..36: note = Synthetic oligonucleotide
  source 1..36: mol_type = other DNA

SEQ ID NO: 28593 - DNA, 36 bp, synthetic construct; identical to SEQ ID NO: 13893
  misc_feature 1..36: note = Synthetic oligonucleotide
  source 1..36: mol_type = other DNA

SEQ ID NO: 28594 - DNA, 36 bp, synthetic construct; identical to SEQ ID NO: 13893
  misc_feature 1..36: note = Synthetic oligonucleotide
  source 1..36: mol_type = other DNA

SEQ ID NO: 28595 - DNA, 36 bp, synthetic construct; identical to SEQ ID NO: 13893
  misc_feature 1..36: note = Synthetic oligonucleotide
  source 1..36: mol_type = other DNA

SEQ ID NO: 28596 - DNA, 36 bp, synthetic construct; identical to SEQ ID NO: 13893
  misc_feature 1..36: note = Synthetic oligonucleotide
  source 1..36: mol_type = other DNA

SEQ ID NO: 28597 - DNA, 36 bp, synthetic construct; identical to SEQ ID NO: 13893
  misc_feature 1..36: note = Synthetic oligonucleotide
  source 1..36: mol_type = other DNA

SEQ ID NO: 28598 - DNA, 36 bp, synthetic construct; identical to SEQ ID NO: 13893
  misc_feature 1..36: note = Synthetic oligonucleotide
  source 1..36: mol_type = other DNA

SEQ ID NO: 28599 - DNA, 36 bp, synthetic construct; identical to SEQ ID NO: 13893
  misc_feature 1..36: note = Synthetic oligonucleotide
  source 1..36: mol_type = other DNA

SEQ ID NO: 28600 - DNA, 36 bp, synthetic construct; identical to SEQ ID NO: 13893
  misc_feature 1..36: note = Synthetic oligonucleotide
  source 1..36: mol_type = other DNA

SEQ ID NO: 28601 - DNA, 24 bp, synthetic construct
  misc_feature 1..24: note = Synthetic oligonucleotide
  source 1..24: mol_type = other DNA
gttgtggtttgatgtagaatttcg

SEQ ID NO: 28602 - DNA, 36 bp, synthetic construct; identical to SEQ ID NO: 13895
  misc_feature 1..36: note = Synthetic oligonucleotide
  source 1..36: mol_type = other DNA

SEQ ID NO: 28603 - DNA, 36 bp, synthetic construct; identical to SEQ ID NO: 13895
  misc_feature 1..36: note = Synthetic oligonucleotide
  source 1..36: mol_type = other DNA

SEQ ID NO: 28604 - DNA, 36 bp, synthetic construct; identical to SEQ ID NO: 13895
  misc_feature 1..36: note = Synthetic oligonucleotide
  source 1..36: mol_type = other DNA

SEQ ID NO: 28605 - DNA, 36 bp, synthetic construct; identical to SEQ ID NO: 13895
  misc_feature 1..36: note = Synthetic oligonucleotide
  source 1..36: mol_type = other DNA

SEQ ID NO: 28606 - DNA, 36 bp, synthetic construct; identical to SEQ ID NO: 13895
  misc_feature 1..36: note = Synthetic oligonucleotide
  source 1..36: mol_type = other DNA

SEQ ID NO: 28607 - DNA, 36 bp, synthetic construct; identical to SEQ ID NO: 13895
  misc_feature 1..36: note = Synthetic oligonucleotide
  source 1..36: mol_type = other DNA

SEQ ID NO: 28608 - DNA, 36 bp, synthetic construct; identical to SEQ ID NO: 13895
  misc_feature 1..36: note = Synthetic oligonucleotide
  source 1..36: mol_type = other DNA

SEQ ID NO: 28609 - DNA, 36 bp, synthetic construct; identical to SEQ ID NO: 13895
  misc_feature 1..36: note = Synthetic oligonucleotide
  source 1..36: mol_type = other DNA

SEQ ID NO: 28610 - DNA, 36 bp, synthetic construct; identical to SEQ ID NO: 13895
  misc_feature 1..36: note = Synthetic oligonucleotide
  source 1..36: mol_type = other DNA

SEQ ID NO: 28611 - DNA, 36 bp, synthetic construct; identical to SEQ ID NO: 13895
  misc_feature 1..36: note = Synthetic oligonucleotide
  source 1..36: mol_type = other DNA

SEQ ID NO: 28612 - DNA, 36 bp, synthetic construct; identical to SEQ ID NO: 13895
  misc_feature 1..36: note = Synthetic oligonucleotide
  source 1..36: mol_type = other DNA

SEQ ID NO: 28613 - DNA, 36 bp, synthetic construct; identical to SEQ ID NO: 13895
  misc_feature 1..36: note = Synthetic oligonucleotide
  source 1..36: mol_type = other DNA

SEQ ID NO: 28614 - DNA, 36 bp, synthetic construct; identical to SEQ ID NO: 13895
  misc_feature 1..36: note = Synthetic oligonucleotide
  source 1..36: mol_type = other DNA

SEQ ID NO: 28615 - DNA, 36 bp, synthetic construct; identical to SEQ ID NO: 13895
  misc_feature 1..36: note = Synthetic oligonucleotide
  source 1..36: mol_type = other DNA

SEQ ID NO: 28616 - DNA, 36 bp, synthetic construct; identical to SEQ ID NO: 13895
  misc_feature 1..36: note = Synthetic oligonucleotide
  source 1..36: mol_type = other DNA

SEQ ID NO: 28617 - DNA, 36 bp, synthetic construct; identical to SEQ ID NO: 13895
  misc_feature 1..36: note = Synthetic oligonucleotide
  source 1..36: mol_type = other DNA

SEQ ID NO: 28618 - DNA, 36 bp, synthetic construct; identical to SEQ ID NO: 13895
  misc_feature 1..36: note = Synthetic oligonucleotide
  source 1..36: mol_type = other DNA

SEQ ID NO: 28619 - DNA, 36 bp, synthetic construct; identical to SEQ ID NO: 13895
  misc_feature 1..36: note = Synthetic oligonucleotide
  source 1..36: mol_type = other DNA

SEQ ID NO: 28620 - DNA, 36 bp, synthetic construct; identical to SEQ ID NO: 13895
  misc_feature 1..36: note = Synthetic oligonucleotide
  source 1..36: mol_type = other DNA

SEQ ID NO: 28621 - DNA, 36 bp, synthetic construct; identical to SEQ ID NO: 13895
  misc_feature 1..36: note = Synthetic oligonucleotide
  source 1..36: mol_type = other DNA

SEQ ID NO: 28622 - DNA, 36 bp, synthetic construct; identical to SEQ ID NO: 13895
  misc_feature 1..36: note = Synthetic oligonucleotide
  source 1..36: mol_type = other DNA

SEQ ID NO: 28623 - DNA, 36 bp, synthetic construct; identical to SEQ ID NO: 13895
  misc_feature 1..36: note = Synthetic oligonucleotide
  source 1..36: mol_type = other DNA

SEQ ID NO: 28624 - DNA, 36 bp, synthetic construct; identical to SEQ ID NO: 13895
  misc_feature 1..36: note = Synthetic oligonucleotide
  source 1..36: mol_type = other DNA

SEQ ID NO: 28625 - DNA, 36 bp, synthetic construct; identical to SEQ ID NO: 13895
  misc_feature 1..36: note = Synthetic oligonucleotide
  source 1..36: mol_type = other DNA

SEQ ID NO: 28626 - DNA, 36 bp, synthetic construct; identical to SEQ ID NO: 13895
  misc_feature 1..36: note = Synthetic oligonucleotide
  source 1..36: mol_type = other DNA

SEQ ID NO: 28627 - DNA, 36 bp, synthetic construct; identical to SEQ ID NO: 13895
  misc_feature 1..36: note = Synthetic oligonucleotide
  source 1..36: mol_type = other DNA

SEQ ID NO: 28628 - DNA, 36 bp, synthetic construct; identical to SEQ ID NO: 13895
  misc_feature 1..36: note = Synthetic oligonucleotide
  source 1..36: mol_type = other DNA

SEQ ID NO: 28629 - DNA, 36 bp, synthetic construct; identical to SEQ ID NO: 13895
  misc_feature 1..36: note = Synthetic oligonucleotide
  source 1..36: mol_type = other DNA

SEQ ID NO: 28630 - DNA, 36 bp, synthetic construct; identical to SEQ ID NO: 13895
  misc_feature 1..36: note = Synthetic oligonucleotide
  source 1..36: mol_type = other DNA

SEQ ID NO: 28631 - DNA, 36 bp, synthetic construct; identical to SEQ ID NO: 13895
  misc_feature 1..36: note = Synthetic oligonucleotide
  source 1..36: mol_type = other DNA

SEQ ID NO: 28632 - DNA, 36 bp, synthetic construct; identical to SEQ ID NO: 13895
  misc_feature 1..36: note = Synthetic oligonucleotide
  source 1..36: mol_type = other DNA

SEQ ID NO: 28633 - DNA, 36 bp, synthetic construct; identical to SEQ ID NO: 13895
  misc_feature 1..36: note = Synthetic oligonucleotide
  source 1..36: mol_type = other DNA

SEQ ID NO: 28634 - DNA, 36 bp, synthetic construct; identical to SEQ ID NO: 13895
  misc_feature 1..36: note = Synthetic oligonucleotide
  source 1..36: mol_type = other DNA

SEQ ID NO: 28635 - DNA, 36 bp, synthetic construct; identical to SEQ ID NO: 13895
  misc_feature 1..36: note = Synthetic oligonucleotide
  source 1..36: mol_type = other DNA

SEQ ID NO: 28636 - DNA, 36 bp, synthetic construct; identical to SEQ ID NO: 13895
  misc_feature 1..36: note = Synthetic oligonucleotide
  source 1..36: mol_type = other DNA

SEQ ID NO: 28637 - DNA, 36 bp, synthetic construct; identical to SEQ ID NO: 13897
  misc_feature 1..36: note = Synthetic oligonucleotide
  source 1..36: mol_type = other DNA

SEQ ID NO: 28638 - DNA, 36 bp, synthetic construct; identical to SEQ ID NO: 13897
  misc_feature 1..36: note = Synthetic oligonucleotide
  source 1..36: mol_type = other DNA

SEQ ID NO: 28639 - DNA, 36 bp, synthetic construct; identical to SEQ ID NO: 13897
  misc_feature 1..36: note = Synthetic oligonucleotide
  source 1..36: mol_type = other DNA

SEQ ID NO: 28640 - DNA, 36 bp, synthetic construct; identical to SEQ ID NO: 13897
  misc_feature 1..36: note = Synthetic oligonucleotide
  source 1..36: mol_type = other DNA

SEQ ID NO: 28641 - DNA, 36 bp, synthetic construct; identical to SEQ ID NO: 13897
  misc_feature 1..36: note = Synthetic oligonucleotide
  source 1..36: mol_type = other DNA

SEQ ID NO: 28642 - DNA, 36 bp, synthetic construct; identical to SEQ ID NO: 13897
  misc_feature 1..36: note = Synthetic oligonucleotide
  source 1..36: mol_type = other DNA

SEQ ID NO: 28643 - DNA, 36 bp, synthetic construct; identical to SEQ ID NO: 13897
  misc_feature 1..36: note = Synthetic oligonucleotide
  source 1..36: mol_type = other DNA

SEQ ID NO: 28644 - DNA, 36 bp, synthetic construct; identical to SEQ ID NO: 13897
  misc_feature 1..36: note = Synthetic oligonucleotide
  source 1..36: mol_type = other DNA

SEQ ID NO: 28645 - DNA, 36 bp, synthetic construct
  misc_feature 1..36: note = Synthetic oligonucleotide
  source 1..36: mol_type = other DNA
gttgtggtttgatgtagagaaactatataatacaac

SEQ ID NO: 28646 - DNA, 36 bp, synthetic construct
  misc_feature 1..36: note = Synthetic oligonucleotide
  source 1..36: mol_type = other DNA
gttgtggtttgatgtagattcccaataagatacaac

SEQ ID NO: 28647 - DNA, 36 bp, synthetic construct; identical to SEQ ID NO: 28646
  misc_feature 1..36: note = Synthetic oligonucleotide
  source 1..36: mol_type = other DNA

SEQ ID NO: 28648 - DNA, 36 bp, synthetic construct; identical to SEQ ID NO: 13898
  misc_feature 1..36: note = Synthetic oligonucleotide
  source 1..36: mol_type = other DNA

SEQ ID NO: 28649 - DNA, 36 bp, synthetic construct; identical to SEQ ID NO: 13898
  misc_feature 1..36: note = Synthetic oligonucleotide
  source 1..36: mol_type = other DNA

SEQ ID NO: 28650 - DNA, 36 bp, synthetic construct
  misc_feature 1..36: note = Synthetic oligonucleotide
  source 1..36: mol_type = other DNA
gttgtggtttgatgtaggaaaaggatgatatacaac

SEQ ID NO: 28651 - DNA, 36 bp, synthetic construct; identical to SEQ ID NO: 28650
  misc_feature 1..36: note = Synthetic oligonucleotide
  source 1..36: mol_type = other DNA

SEQ ID NO: 28652 - DNA, 36 bp, synthetic construct; identical to SEQ ID NO: 28650
  misc_feature 1..36: note = Synthetic oligonucleotide
  source 1..36: mol_type = other DNA

SEQ ID NO: 28653 - DNA, 36 bp, synthetic construct; identical to SEQ ID NO: 28650
  misc_feature 1..36: note = Synthetic oligonucleotide
  source 1..36: mol_type = other DNA

SEQ ID NO: 28654 - DNA, 36 bp, synthetic construct
  misc_feature 1..36: note = Synthetic oligonucleotide
  source 1..36: mol_type = other DNA
gttgtggtttgatgtaggaaacgaacgatatacaac

SEQ ID NO: 28655 - DNA, 36 bp, synthetic construct
  misc_feature 1..36: note = Synthetic oligonucleotide
  source 1..36: mol_type = other DNA
gttgtggtttgatgtaggaacaagatgataaacaac

SEQ ID NO: 28656 - DNA, 36 bp, synthetic construct; identical to SEQ ID NO: 28655
  misc_feature 1..36: note = Synthetic oligonucleotide
  source 1..36: mol_type = other DNA

SEQ ID NO: 28657 - DNA, 36 bp, synthetic construct
  misc_feature 1..36: note = Synthetic oligonucleotide
  source 1..36: mol_type = other DNA
gttgtggtttgatgtaggaatagacagataaacacc

SEQ ID NO: 28658 - DNA, 36 bp, synthetic construct
  misc_feature 1..36: note = Synthetic oligonucleotide
  source 1..36: mol_type = other DNA
gttgtggtttgatgtaggaatagatagatatacaac

SEQ ID NO: 28659 - DNA, 36 bp, synthetic construct; identical to SEQ ID NO: 13907
  misc_feature 1..36: note = Synthetic oligonucleotide
  source 1..36: mol_type = other DNA

SEQ ID NO: 28660 - DNA, 36 bp, synthetic construct; identical to SEQ ID NO: 13908
  misc_feature 1..36: note = Synthetic oligonucleotide
  source 1..36: mol_type = other DNA

SEQ ID NO: 28661 - DNA, 36 bp, synthetic construct; identical to SEQ ID NO: 13909
  misc_feature 1..36: note = Synthetic oligonucleotide
  source 1..36: mol_type = other DNA

SEQ ID NO: 28662 - DNA, 36 bp, synthetic construct; identical to SEQ ID NO: 13909
  misc_feature 1..36: note = Synthetic oligonucleotide
  source 1..36: mol_type = other DNA

SEQ ID NO: 28663 - DNA, 36 bp, synthetic construct; identical to SEQ ID NO: 13909
  misc_feature 1..36: note = Synthetic oligonucleotide
  source 1..36: mol_type = other DNA

SEQ ID NO: 28664 - DNA, 36 bp, synthetic construct; identical to SEQ ID NO: 13909
  misc_feature 1..36: note = Synthetic oligonucleotide
  source 1..36: mol_type = other DNA

SEQ ID NO: 28665 - DNA, 36 bp, synthetic construct; identical to SEQ ID NO: 13909
  misc_feature 1..36: note = Synthetic oligonucleotide
  source 1..36: mol_type = other DNA

SEQ ID NO: 28666 - DNA, 36 bp, synthetic construct; identical to SEQ ID NO: 13909
  misc_feature 1..36: note = Synthetic oligonucleotide
  source 1..36: mol_type = other DNA

SEQ ID NO: 28667 - DNA, 36 bp, synthetic construct; identical to SEQ ID NO: 13909
  misc_feature 1..36: note = Synthetic oligonucleotide
  source 1..36: mol_type = other DNA

SEQ ID NO: 28668 - DNA, 36 bp, synthetic construct; identical to SEQ ID NO: 13909
  misc_feature 1..36: note = Synthetic oligonucleotide
  source 1..36: mol_type = other DNA

SEQ ID NO: 28669 - DNA, 36 bp, synthetic construct; identical to SEQ ID NO: 13909
  misc_feature 1..36: note = Synthetic oligonucleotide
  source 1..36: mol_type = other DNA

SEQ ID NO: 28670 - DNA, 36 bp, synthetic construct; identical to SEQ ID NO: 13909
  misc_feature 1..36: note = Synthetic oligonucleotide
  source 1..36: mol_type = other DNA

SEQ ID NO: 28671 - DNA, 36 bp, synthetic construct; identical to SEQ ID NO: 13909
  misc_feature 1..36: note = Synthetic oligonucleotide
  source 1..36: mol_type = other DNA

SEQ ID NO: 28672 - DNA, 36 bp, synthetic construct; identical to SEQ ID NO: 13910
  misc_feature 1..36: note = Synthetic oligonucleotide
  source 1..36: mol_type = other DNA

SEQ ID NO: 28673 - DNA, 36 bp, synthetic construct
  misc_feature 1..36: note = Synthetic oligonucleotide
  source 1..36: mol_type = other DNA
gttgtggtttgatgtaggagtcaaaagatatacaac

SEQ ID NO: 28674 - DNA, 36 bp, synthetic construct
  misc_feature 1..36: note = Synthetic oligonucleotide
  source 1..36: mol_type = other DNA
gttgtggtttgatgtaggattcaaaagatatacaac

SEQ ID NO: 28675 - DNA, 36 bp, synthetic construct; identical to SEQ ID NO: 28674
  misc_feature 1..36: note = Synthetic oligonucleotide
  source 1..36: mol_type = other DNA

SEQ ID NO: 28676 - DNA, 36 bp, synthetic construct; identical to SEQ ID NO: 28674
  misc_feature 1..36: note = Synthetic oligonucleotide
  source 1..36: mol_type = other DNA

SEQ ID NO: 28677 - DNA, 36 bp, synthetic construct; identical to SEQ ID NO: 13914
  misc_feature 1..36: note = Synthetic oligonucleotide
  source 1..36: mol_type = other DNA

SEQ ID NO: 28678 - DNA, 36 bp, synthetic construct; identical to SEQ ID NO: 13914
  misc_feature 1..36: note = Synthetic oligonucleotide
  source 1..36: mol_type = other DNA

SEQ ID NO: 28679 - DNA, 36 bp, synthetic construct
  misc_feature 1..36: note = Synthetic oligonucleotide
  source 1..36: mol_type = other DNA
gttgtggtttgatgtggaatttcgataagatacaac

SEQ ID NO: 28680 - DNA, 37 bp, synthetic construct
  misc_feature 1..37: note = Synthetic oligonucleotide
  source 1..37: mol_type = other DNA
gttgtggtttgatgtggaatttcgataagatacaacc

SEQ ID NO: 28681 - DNA, 37 bp, synthetic construct
  misc_feature 1..37: note = Synthetic oligonucleotide
  source 1..37: mol_type = other DNA
gttgtggtttgattaaaaagaaagattgacgatatta

SEQ ID NO: 28682 - DNA, 36 bp, synthetic construct
  misc_feature 1..36: note = Synthetic oligonucleotide
  source 1..36: mol_type = other DNA
gttgtggtttgattaaagaaaaaggattactacatt

SEQ ID NO: 28683 - DNA, 36 bp, synthetic construct
  misc_feature 1..36: note = Synthetic oligonucleotide
  source 1..36: mol_type = other DNA
gttgtggtttgattaaagattagaaaaaacaatatt

SEQ ID NO: 28684 - DNA, 35 bp, synthetic construct
  misc_feature 1..35: note = Synthetic oligonucleotide
  source 1..35: mol_type = other DNA
gttgtggtttgattaaagattagaaaaaacgatat

SEQ ID NO: 28685 - DNA, 36 bp, synthetic construct; identical to SEQ ID NO: 13919
  misc_feature 1..36: note = Synthetic oligonucleotide
  source 1..36: mol_type = other DNA

SEQ ID NO: 28686 - DNA, 36 bp, synthetic construct; identical to SEQ ID NO: 13919
  misc_feature 1..36: note = Synthetic oligonucleotide
  source 1..36: mol_type = other DNA

SEQ ID NO: 28687 - DNA, 36 bp, synthetic construct; identical to SEQ ID NO: 13919
  misc_feature 1..36: note = Synthetic oligonucleotide
  source 1..36: mol_type = other DNA

SEQ ID NO: 28688 - DNA, 36 bp, synthetic construct; identical to SEQ ID NO: 13919
  misc_feature 1..36: note = Synthetic oligonucleotide
  source 1..36: mol_type = other DNA

SEQ ID NO: 28689 - DNA, 36 bp, synthetic construct; identical to SEQ ID NO: 13919
  misc_feature 1..36: note = Synthetic oligonucleotide
  source 1..36: mol_type = other DNA

SEQ ID NO: 28690 - DNA, 36 bp, synthetic construct; identical to SEQ ID NO: 13919
  misc_feature 1..36: note = Synthetic oligonucleotide
  source 1..36: mol_type = other DNA

SEQ ID NO: 28691 - DNA, 36 bp, synthetic construct; identical to SEQ ID NO: 13919
  misc_feature 1..36: note = Synthetic oligonucleotide
  source 1..36: mol_type = other DNA

SEQ ID NO: 28692 - DNA, 36 bp, synthetic construct; identical to SEQ ID NO: 13919
  misc_feature 1..36: note = Synthetic oligonucleotide
  source 1..36: mol_type = other DNA

SEQ ID NO: 28693 - DNA, 36 bp, synthetic construct; identical to SEQ ID NO: 13919
  misc_feature 1..36: note = Synthetic oligonucleotide
  source 1..36: mol_type = other DNA

SEQ ID NO: 28694 - DNA, 36 bp, synthetic construct
  misc_feature 1..36: note = Synthetic oligonucleotide
  source 1..36: mol_type = other DNA
gttgtggtttgattaaagattagaaaacaagatatt

SEQ ID NO: 28695 - DNA, 36 bp, synthetic construct; identical to SEQ ID NO: 13921
  misc_feature 1..36: note = Synthetic oligonucleotide
  source 1..36: mol_type = other DNA

SEQ ID NO: 28696 - DNA, 36 bp, synthetic construct; identical to SEQ ID NO: 13921
  misc_feature 1..36: note = Synthetic oligonucleotide
  source 1..36: mol_type = other DNA

SEQ ID NO: 28697 - DNA, 36 bp, synthetic construct; identical to SEQ ID NO: 13921
  misc_feature 1..36: note = Synthetic oligonucleotide
  source 1..36: mol_type = other DNA

SEQ ID NO: 28698 - DNA, 36 bp, synthetic construct; identical to SEQ ID NO: 13921
  misc_feature 1..36: note = Synthetic oligonucleotide
  source 1..36: mol_type = other DNA

SEQ ID NO: 28699 - DNA, 36 bp, synthetic construct; identical to SEQ ID NO: 13921
  misc_feature 1..36: note = Synthetic oligonucleotide
  source 1..36: mol_type = other DNA

SEQ ID NO: 28700 - DNA, 36 bp, synthetic construct; identical to SEQ ID NO: 13921
  misc_feature 1..36: note = Synthetic oligonucleotide
  source 1..36: mol_type = other DNA

SEQ ID NO: 28701 - DNA, 36 bp, synthetic construct; identical to SEQ ID NO: 13921
  misc_feature 1..36: note = Synthetic oligonucleotide
  source 1..36: mol_type = other DNA

SEQ ID NO: 28702 - DNA, 36 bp, synthetic construct; identical to SEQ ID NO: 13921
  misc_feature 1..36: note = Synthetic oligonucleotide
  source 1..36: mol_type = other DNA

SEQ ID NO: 28703 - DNA, 36 bp, synthetic construct; identical to SEQ ID NO: 13921
  misc_feature 1..36: note = Synthetic oligonucleotide
  source 1..36: mol_type = other DNA

SEQ ID NO: 28704 - DNA, 36 bp, synthetic construct; identical to SEQ ID NO: 13921
  misc_feature 1..36: note = Synthetic oligonucleotide
  source 1..36: mol_type = other DNA

SEQ ID NO: 28705 - DNA, 36 bp, synthetic construct; identical to SEQ ID NO: 13921
  misc_feature 1..36: note = Synthetic oligonucleotide
  source 1..36: mol_type = other DNA

SEQ ID NO: 28706 - DNA, 36 bp, synthetic construct; identical to SEQ ID NO: 13921
  misc_feature 1..36: note = Synthetic oligonucleotide
  source 1..36: mol_type = other DNA

SEQ ID NO: 28707 - DNA, 36 bp, synthetic construct; identical to SEQ ID NO: 13921
  misc_feature 1..36: note = Synthetic oligonucleotide
  source 1..36: mol_type = other DNA

SEQ ID NO: 28708 - DNA, 36 bp, synthetic construct; identical to SEQ ID NO: 13921
  misc_feature 1..36: note = Synthetic oligonucleotide
  source 1..36: mol_type = other DNA

SEQ ID NO: 28709 - DNA, 36 bp, synthetic construct; identical to SEQ ID NO: 13921
  misc_feature 1..36: note = Synthetic oligonucleotide
  source 1..36: mol_type = other DNA

SEQ ID NO: 28710 - DNA, 36 bp, synthetic construct; identical to SEQ ID NO: 13921
  misc_feature 1..36: note = Synthetic oligonucleotide
  source 1..36: mol_type = other DNA

SEQ ID NO: 28711 - DNA, 36 bp, synthetic construct; identical to SEQ ID NO: 13921
  misc_feature 1..36: note = Synthetic oligonucleotide
  source 1..36: mol_type = other DNA

SEQ ID NO: 28712 - DNA, 36 bp, synthetic construct; identical to SEQ ID NO: 13921
  misc_feature 1..36: note = Synthetic oligonucleotide
  source 1..36: mol_type = other DNA

SEQ ID NO: 28713 - DNA, 36 bp, synthetic construct; identical to SEQ ID NO: 13921
  misc_feature 1..36: note = Synthetic oligonucleotide
  source 1..36: mol_type = other DNA

SEQ ID NO: 28714 - DNA, 36 bp, synthetic construct; identical to SEQ ID NO: 13921
  misc_feature 1..36: note = Synthetic oligonucleotide
  source 1..36: mol_type = other DNA

SEQ ID NO: 28715 - DNA, 36 bp, synthetic construct; identical to SEQ ID NO: 13921
  misc_feature 1..36: note = Synthetic oligonucleotide
  source 1..36: mol_type = other DNA

SEQ ID NO: 28716 - DNA, 36 bp, synthetic construct; identical to SEQ ID NO: 13921
  misc_feature 1..36: note = Synthetic oligonucleotide
  source 1..36: mol_type = other DNA

SEQ ID NO: 28717 - DNA, 36 bp, synthetic construct; identical to SEQ ID NO: 13921
  misc_feature 1..36: note = Synthetic oligonucleotide
  source 1..36: mol_type = other DNA

SEQ ID NO: 28718 - DNA, 36 bp, synthetic construct; identical to SEQ ID NO: 13921
  misc_feature 1..36: note = Synthetic oligonucleotide
  source 1..36: mol_type = other DNA

SEQ ID NO: 28719 - DNA, 36 bp, synthetic construct; identical to SEQ ID NO: 13921
  misc_feature 1..36: note = Synthetic oligonucleotide
  source 1..36: mol_type = other DNA

SEQ ID NO: 28720 - DNA, 36 bp, synthetic construct; identical to SEQ ID NO: 13921
  misc_feature 1..36: note = Synthetic oligonucleotide
  source 1..36: mol_type = other DNA

SEQ ID NO: 28721 - DNA, 36 bp, synthetic construct; identical to SEQ ID NO: 13921
  misc_feature 1..36: note = Synthetic oligonucleotide
  source 1..36: mol_type = other DNA

SEQ ID NO: 28722 - DNA, 36 bp, synthetic construct; identical to SEQ ID NO: 13921
  misc_feature 1..36: note = Synthetic oligonucleotide
  source 1..36: mol_type = other DNA

SEQ ID NO: 28723 - DNA, 36 bp, synthetic construct; identical to SEQ ID NO: 13921
  misc_feature 1..36: note = Synthetic oligonucleotide
  source 1..36: mol_type = other DNA

SEQ ID NO: 28724 - DNA, 36 bp, synthetic construct; identical to SEQ ID NO: 13921
  misc_feature 1..36: note = Synthetic oligonucleotide
  source 1..36: mol_type = other DNA

SEQ ID NO: 28725 - DNA, 36 bp, synthetic construct; identical to SEQ ID NO: 13921
  misc_feature 1..36: note = Synthetic oligonucleotide
  source 1..36: mol_type = other DNA

SEQ ID NO: 28726 - DNA, 36 bp, synthetic construct; identical to SEQ ID NO: 13921
  misc_feature 1..36: note = Synthetic oligonucleotide
  source 1..36: mol_type = other DNA

SEQ ID NO: 28727 - DNA, 36 bp, synthetic construct; identical to SEQ ID NO: 13921
  misc_feature 1..36: note = Synthetic oligonucleotide
  source 1..36: mol_type = other DNA

SEQ ID NO: 28728 - DNA, 36 bp, synthetic construct; identical to SEQ ID NO: 13921
  misc_feature 1..36: note = Synthetic oligonucleotide
  source 1..36: mol_type = other DNA

SEQ ID NO: 28729 - DNA, 36 bp, synthetic construct; identical to SEQ ID NO: 13921
  misc_feature 1..36: note = Synthetic oligonucleotide
  source 1..36: mol_type = other DNA

SEQ ID NO: 28730 - DNA, 36 bp, synthetic construct; identical to SEQ ID NO: 13921
  misc_feature 1..36: note = Synthetic oligonucleotide
  source 1..36: mol_type = other DNA

SEQ ID NO: 28731 - DNA, 36 bp, synthetic construct; identical to SEQ ID NO: 13921
  misc_feature 1..36: note = Synthetic oligonucleotide
  source 1..36: mol_type = other DNA

SEQ ID NO: 28732 - DNA, 36 bp, synthetic construct; identical to SEQ ID NO: 13921
  misc_feature 1..36: note = Synthetic oligonucleotide
  source 1..36: mol_type = other DNA

SEQ ID NO: 28733 - DNA, 36 bp, synthetic construct; identical to SEQ ID NO: 13921
  misc_feature 1..36: note = Synthetic oligonucleotide
  source 1..36: mol_type = other DNA

SEQ ID NO: 28734 - DNA, 36 bp, synthetic construct; identical to SEQ ID NO: 13921
  misc_feature 1..36: note = Synthetic oligonucleotide
  source 1..36: mol_type = other DNA

SEQ ID NO: 28735 - DNA, 36 bp, synthetic construct; identical to SEQ ID NO: 13921
  misc_feature 1..36: note = Synthetic oligonucleotide
  source 1..36: mol_type = other DNA

SEQ ID NO: 28736 - DNA, 36 bp, synthetic construct; identical to SEQ ID NO: 13921
  misc_feature 1..36: note = Synthetic oligonucleotide
  source 1..36: mol_type = other DNA

SEQ ID NO: 28737 - DNA, 36 bp, synthetic construct; identical to SEQ ID NO: 13921
  misc_feature 1..36: note = Synthetic oligonucleotide
  source 1..36: mol_type = other DNA

SEQ ID NO: 28738 - DNA, 36 bp, synthetic construct; identical to SEQ ID NO: 13921
  misc_feature 1..36: note = Synthetic oligonucleotide
  source 1..36: mol_type = other DNA

SEQ ID NO: 28739 - DNA, 36 bp, synthetic construct; identical to SEQ ID NO: 13921
  misc_feature 1..36: note = Synthetic oligonucleotide
  source 1..36: mol_type = other DNA

SEQ ID NO: 28740 - DNA, 36 bp, synthetic construct; identical to SEQ ID NO: 13922
  misc_feature 1..36: note = Synthetic oligonucleotide
  source 1..36: mol_type = other DNA

SEQ ID NO: 28741 - DNA, 36 bp, synthetic construct; identical to SEQ ID NO: 13922
  misc_feature 1..36: note = Synthetic oligonucleotide
  source 1..36: mol_type = other DNA

SEQ ID NO: 28742 - DNA, 36 bp, synthetic construct; identical to SEQ ID NO: 13925
  misc_feature 1..36: note = Synthetic oligonucleotide
  source 1..36: mol_type = other DNA

SEQ ID NO: 28743 - DNA, 36 bp, synthetic construct; identical to SEQ ID NO: 13925
  misc_feature 1..36: note = Synthetic oligonucleotide
  source 1..36: mol_type = other DNA

SEQ ID NO: 28744 - DNA, 36 bp, synthetic construct; identical to SEQ ID NO: 13925
  misc_feature 1..36: note = Synthetic oligonucleotide
  source 1..36: mol_type = other DNA

SEQ ID NO: 28745 - DNA, 36 bp, synthetic construct; identical to SEQ ID NO: 13925
  misc_feature 1..36: note = Synthetic oligonucleotide
  source 1..36: mol_type = other DNA

SEQ ID NO: 28746 - DNA, 36 bp, synthetic construct; identical to SEQ ID NO: 13925
  misc_feature 1..36: note = Synthetic oligonucleotide
  source 1..36: mol_type = other DNA

SEQ ID NO: 28747 - DNA, 36 bp, synthetic construct; identical to SEQ ID NO: 13925
  misc_feature 1..36: note = Synthetic oligonucleotide
  source 1..36: mol_type = other DNA

SEQ ID NO: 28748 - DNA, 36 bp, synthetic construct; identical to SEQ ID NO: 13925
  misc_feature 1..36: note = Synthetic oligonucleotide
  source 1..36: mol_type = other DNA

SEQ ID NO: 28749 - DNA, 36 bp, synthetic construct; identical to SEQ ID NO: 13925
  misc_feature 1..36: note = Synthetic oligonucleotide
  source 1..36: mol_type = other DNA

SEQ ID NO: 28750 - DNA, 36 bp, synthetic construct; identical to SEQ ID NO: 13925
  misc_feature 1..36: note = Synthetic oligonucleotide
  source 1..36: mol_type = other DNA

SEQ ID NO: 28751 - DNA, 36 bp, synthetic construct; identical to SEQ ID NO: 13925
  misc_feature 1..36: note = Synthetic oligonucleotide
  source 1..36: mol_type = other DNA

SEQ ID NO: 28752 - DNA, 36 bp, synthetic construct
  misc_feature 1..36: note = Synthetic oligonucleotide
  source 1..36: mol_type = other DNA
gttgtggtttgattaaagattagaattcacgatatt

SEQ ID NO: 28753 - DNA, 36 bp, synthetic construct; identical to SEQ ID NO: 28752
  misc_feature 1..36: note = Synthetic oligonucleotide
  source 1..36: mol_type = other DNA

SEQ ID NO: 28754 - DNA, 36 bp, synthetic construct; identical to SEQ ID NO: 28752
  misc_feature 1..36: note = Synthetic oligonucleotide
  source 1..36: mol_type = other DNA

SEQ ID NO: 28755 - DNA, 31 bp, synthetic construct
  misc_feature 1..31: note = Synthetic oligonucleotide
  source 1..31: mol_type = other DNA
gttgtggtttgattaaagattagagaaaacg

SEQ ID NO: 28756 - DNA, 36 bp, synthetic construct; identical to SEQ ID NO: 13927
  misc_feature 1..36: note = Synthetic oligonucleotide
  source 1..36: mol_type = other DNA

SEQ ID NO: 28757 - DNA, 36 bp, synthetic construct; identical to SEQ ID NO: 13927
  misc_feature 1..36: note = Synthetic oligonucleotide
  source 1..36: mol_type = other DNA

SEQ ID NO: 28758 - DNA, 36 bp, synthetic construct; identical to SEQ ID NO: 13927
  misc_feature 1..36: note = Synthetic oligonucleotide
  source 1..36: mol_type = other DNA

SEQ ID NO: 28759 - DNA, 36 bp, synthetic construct; identical to SEQ ID NO: 13927
  misc_feature 1..36: note = Synthetic oligonucleotide
  source 1..36: mol_type = other DNA

SEQ ID NO: 28760 - DNA, 36 bp, synthetic construct; identical to SEQ ID NO: 13927
  misc_feature 1..36: note = Synthetic oligonucleotide
  source 1..36: mol_type = other DNA

SEQ ID NO: 28761 - DNA, 36 bp, synthetic construct; identical to SEQ ID NO: 13927
  misc_feature 1..36: note = Synthetic oligonucleotide
  source 1..36: mol_type = other DNA

SEQ ID NO: 28762 - DNA, 36 bp, synthetic construct; identical to SEQ ID NO: 13927
  misc_feature 1..36: note = Synthetic oligonucleotide
  source 1..36: mol_type = other DNA

SEQ ID NO: 28763 - DNA, 36 bp, synthetic construct; identical to SEQ ID NO: 13927
  misc_feature 1..36: note = Synthetic oligonucleotide
  source 1..36: mol_type = other DNA

SEQ ID NO: 28764 - DNA, 36 bp, synthetic construct; identical to SEQ ID NO: 13927
  misc_feature 1..36: note = Synthetic oligonucleotide
  source 1..36: mol_type = other DNA

SEQ ID NO: 28765 - DNA, 36 bp, synthetic construct; identical to SEQ ID NO: 13927
  misc_feature 1..36: note = Synthetic oligonucleotide
  source 1..36: mol_type = other DNA

SEQ ID NO: 28766 - DNA, 36 bp, synthetic construct; identical to SEQ ID NO: 13927
  misc_feature 1..36: note = Synthetic oligonucleotide
  source 1..36: mol_type = other DNA

SEQ ID NO: 28767 - DNA, 36 bp, synthetic construct; identical to SEQ ID NO: 13927
  misc_feature 1..36: note = Synthetic oligonucleotide
  source 1..36: mol_type = other DNA

SEQ ID NO: 28768 - DNA, 36 bp, synthetic construct; identical to SEQ ID NO: 13927
  misc_feature 1..36: note = Synthetic oligonucleotide
  source 1..36: mol_type = other DNA

SEQ ID NO: 28769 - DNA, 37 bp, synthetic construct
  misc_feature 1..37: note = Synthetic oligonucleotide
  source 1..37: mol_type = other DNA
gttgtggtttgattaaagattagagaaaacgatattt

SEQ ID NO: 28770 - DNA, 36 bp, synthetic construct; identical to SEQ ID NO: 13929
  misc_feature 1..36: note = Synthetic oligonucleotide
  source 1..36: mol_type = other DNA

SEQ ID NO: 28771 - DNA, 36 bp, synthetic construct; identical to SEQ ID NO: 13929
  misc_feature 1..36: note = Synthetic oligonucleotide
  source 1..36: mol_type = other DNA

SEQ ID NO: 28772 - DNA, 36 bp, synthetic construct; identical to SEQ ID NO: 13932
  misc_feature 1..36: note = Synthetic oligonucleotide
  source 1..36: mol_type = other DNA

SEQ ID NO: 28773 - DNA, 36 bp, synthetic construct
  misc_feature 1..36: note = Synthetic oligonucleotide
  source 1..36: mol_type = other DNA
gttgtggtttgattaaagattaggaagtacgatatt

SEQ ID NO: 28774 - DNA, 36 bp, synthetic construct
  misc_feature 1..36: note = Synthetic oligonucleotide
  source 1..36: mol_type = other DNA
gttgtggtttgattaaagattaggattcacgatatt

SEQ ID NO: 28775 - DNA, 36 bp, synthetic construct
  misc_feature 1..36: note = Synthetic oligonucleotide
  source 1..36: mol_type = other DNA
gttgtggtttgattaaagattgcaaagaacgatatt

SEQ ID NO: 28776 - DNA, 36 bp, synthetic construct
  misc_feature 1..36: note = Synthetic oligonucleotide
  source 1..36: mol_type = other DNA
gttgtggtttgattaaagattggaaagaacgatatt

SEQ ID NO: 28777 - DNA, 36 bp, synthetic construct; identical to SEQ ID NO: 28776
  misc_feature 1..36: note = Synthetic oligonucleotide
  source 1..36: mol_type = other DNA

SEQ ID NO: 28778 - DNA, 36 bp, synthetic construct; identical to SEQ ID NO: 28776
  misc_feature 1..36: note = Synthetic oligonucleotide
  source 1..36: mol_type = other DNA

SEQ ID NO: 28779 - DNA, 36 bp, synthetic construct
  misc_feature 1..36: note = Synthetic oligonucleotide
  source 1..36: mol_type = other DNA
gttgtggtttgattaaagattggaattcacgatatt

SEQ ID NO: 28780 - DNA, 36 bp, synthetic construct; identical to SEQ ID NO: 13934
  misc_feature 1..36: note = Synthetic oligonucleotide
  source 1..36: mol_type = other DNA

SEQ ID NO: 28781 - DNA, 36 bp, synthetic construct; identical to SEQ ID NO: 13934
  misc_feature 1..36: note = Synthetic oligonucleotide
  source 1..36: mol_type = other DNA

SEQ ID NO: 28782 - DNA, 36 bp, synthetic construct; identical to SEQ ID NO: 13934
  misc_feature 1..36: note = Synthetic oligonucleotide
  source 1..36: mol_type = other DNA

SEQ ID NO: 28783 - DNA, 36 bp, synthetic construct; identical to SEQ ID NO: 13934
  misc_feature 1..36: note = Synthetic oligonucleotide
  source 1..36: mol_type = other DNA

SEQ ID NO: 28784 - DNA, 37 bp, synthetic construct
  misc_feature 1..37: note = Synthetic oligonucleotide
  source 1..37: mol_type = other DNA
gttgtggtttgattaaagatttgaaaacacgatattt

SEQ ID NO: 28785 - DNA, 36 bp, synthetic construct
  misc_feature 1..36: note = Synthetic oligonucleotide
  source 1..36: mol_type = other DNA
gttgtggtttgattaaagtttggaaaacacgatatt

SEQ ID NO: 28786 - DNA, 36 bp, synthetic construct; identical to SEQ ID NO: 28785
  misc_feature 1..36: note = Synthetic oligonucleotide
  source 1..36: mol_type = other DNA

SEQ ID NO: 28787 - DNA, 36 bp, synthetic construct; identical to SEQ ID NO: 28785
  misc_feature 1..36: note = Synthetic oligonucleotide
  source 1..36: mol_type = other DNA

SEQ ID NO: 28788 - DNA, 36 bp, synthetic construct; identical to SEQ ID NO: 13938
  misc_feature 1..36: note = Synthetic oligonucleotide
  source 1..36: mol_type = other DNA

SEQ ID NO: 28789 - DNA, 36 bp, synthetic construct
  misc_feature 1..36: note = Synthetic oligonucleotide
  source 1..36: mol_type = other DNA
gttgtggtttgattctaatattcaataagatatacc

SEQ ID NO: 28790 - DNA, 36 bp, synthetic construct
  misc_feature 1..36: note = Synthetic oligonucleotide
  source 1..36: mol_type = other DNA
gttgtggtttgattgaaaattgagataagatataac

SEQ ID NO: 28791 - DNA, 36 bp, synthetic construct
  misc_feature 1..36: note = Synthetic oligonucleotide
  source 1..36: mol_type = other DNA
gttgtggtttgatttaaaaattggataagatattgg

SEQ ID NO: 28792 - DNA, 36 bp, synthetic construct; identical to SEQ ID NO: 13949
  misc_feature 1..36: note = Synthetic oligonucleotide
  source 1..36: mol_type = other DNA

SEQ ID NO: 28793 - DNA, 36 bp, synthetic construct; identical to SEQ ID NO: 13951
  misc_feature 1..36: note = Synthetic oligonucleotide
  source 1..36: mol_type = other DNA

SEQ ID NO: 28794 - DNA, 36 bp, synthetic construct
  misc_feature 1..36: note = Synthetic oligonucleotide
  source 1..36: mol_type = other DNA
gttgtggtttgctttcaattaggaactagctatatt

SEQ ID NO: 28795 - DNA, 36 bp, synthetic construct
  misc_feature 1..36: note = Synthetic oligonucleotide
  source 1..36: mol_type = other DNA
gttgtggtttgctttcaggcatggatttgatatact

SEQ ID NO: 28796 - DNA, 36 bp, synthetic construct
  misc_feature 1..36: note = Synthetic oligonucleotide
  source 1..36: mol_type = other DNA
gttgtggtttggtaaaatcattagatacacaacaag

SEQ ID NO: 28797 - DNA, 36 bp, synthetic construct; identical to SEQ ID NO: 28796
  misc_feature 1..36: note = Synthetic oligonucleotide
  source 1..36: mol_type = other DNA

SEQ ID NO: 28798 - DNA, 35 bp, synthetic construct
  misc_feature 1..35: note = Synthetic oligonucleotide
  source 1..35: mol_type = other DNA
gttgtgtaagaactaagttagtaaaaagtttgaaa

SEQ ID NO: 28799 - DNA, 35 bp, synthetic construct; identical to SEQ ID NO: 28798
  misc_feature 1..35: note = Synthetic oligonucleotide
  source 1..35: mol_type = other DNA

SEQ ID NO: 28800 - DNA, 36 bp, synthetic construct
  misc_feature 1..36: note = Synthetic oligonucleotide
  source 1..36: mol_type = other DNA
gttgtgtattggttgcaaatttagtatctttgaaat

SEQ ID NO: 28801 - DNA, 36 bp, synthetic construct
  misc_feature 1..36: note = Synthetic oligonucleotide
  source 1..36: mol_type = other DNA
gttgtgtcaatattctctattatatcaaaccgcaac

SEQ ID NO: 28802 - DNA, 36 bp, synthetic construct
  misc_feature 1..36: note = Synthetic oligonucleotide
  source 1..36: mol_type = other DNA
gttgtgtcataccaagaaccaagagggggctacaac

SEQ ID NO: 28803 - DNA, 32 bp, synthetic construct
  misc_feature 1..32: note = Synthetic oligonucleotide
  source 1..32: mol_type = other DNA
gttgtgtctgataatgcaaagatactaatttt

SEQ ID NO: 28804 - DNA, 36 bp, synthetic construct
  misc_feature 1..36: note = Synthetic oligonucleotide
  source 1..36: mol_type = other DNA
gttgtgtcttattctatttctacatcaaaccacaac

SEQ ID NO: 28805 - DNA, 37 bp, synthetic construct
  misc_feature 1..37: note = Synthetic oligonucleotide
  source 1..37: mol_type = other DNA
gttgtgtcttggctactagtgctgatctttgaatgcg

SEQ ID NO: 28806 - DNA, 36 bp, synthetic construct
  misc_feature 1..36: note = Synthetic oligonucleotide
  source 1..36: mol_type = other DNA
gttgtgttaccattcaaaattacatacacctaaaac

SEQ ID NO: 28807 - DNA, 36 bp, synthetic construct; identical to SEQ ID NO: 28806
  misc_feature 1..36: note = Synthetic oligonucleotide
  source 1..36: mol_type = other DNA

SEQ ID NO: 28808 - DNA, 36 bp, synthetic construct; identical to SEQ ID NO: 28806
  misc_feature 1..36: note = Synthetic oligonucleotide
  source 1..36: mol_type = other DNA

SEQ ID NO: 28809 - DNA, 37 bp, synthetic construct
  misc_feature 1..37: note = Synthetic oligonucleotide
  source 1..37: mol_type = other DNA
gttgtgttaccattcaaaattacatacacctaaaaca

SEQ ID NO: 28810 - DNA, 38 bp, synthetic construct
  misc_feature 1..38: note = Synthetic oligonucleotide
  source 1..38: mol_type = other DNA
gttgtgttaccattcaaaattacatacacctaaaacct

SEQ ID NO: 28811 - DNA, 36 bp, synthetic construct
  misc_feature 1..36: note = Synthetic oligonucleotide
  source 1..36: mol_type = other DNA
gttgtgttaccctcgtgaattttgctatttgacaac

SEQ ID NO: 28812 - DNA, 36 bp, synthetic construct
  misc_feature 1..36: note = Synthetic oligonucleotide
  source 1..36: mol_type = other DNA
gttgtgttatatccttcttctacatcaaaccacaac

SEQ ID NO: 28813 - DNA, 31 bp, synthetic construct
  misc_feature 1..31: note = Synthetic oligonucleotide
  source 1..31: mol_type = other DNA
gttgtgttatatctcaaagatactcaaaaat

SEQ ID NO: 28814 - DNA, 36 bp, synthetic construct
  misc_feature 1..36: note = Synthetic oligonucleotide
  source 1..36: mol_type = other DNA
gttgtgttatatctcaaagatactcaaaaatgaaag

SEQ ID NO: 28815 - DNA, 36 bp, synthetic construct; identical to SEQ ID NO: 13991
  misc_feature 1..36: note = Synthetic oligonucleotide
  source 1..36: mol_type = other DNA

SEQ ID NO: 28816 - DNA, 36 bp, synthetic construct; identical to SEQ ID NO: 13991
  misc_feature 1..36: note = Synthetic oligonucleotide
  source 1..36: mol_type = other DNA

SEQ ID NO: 28817 - DNA, 36 bp, synthetic construct; identical to SEQ ID NO: 13991
  misc_feature 1..36: note = Synthetic oligonucleotide
  source 1..36: mol_type = other DNA

SEQ ID NO: 28818 - DNA, 36 bp, synthetic construct; identical to SEQ ID NO: 13991
  misc_feature 1..36: note = Synthetic oligonucleotide
  source 1..36: mol_type = other DNA

SEQ ID NO: 28819 - DNA, 36 bp, synthetic construct; identical to SEQ ID NO: 13991
  misc_feature 1..36: note = Synthetic oligonucleotide
  source 1..36: mol_type = other DNA

SEQ ID NO: 28820 - DNA, 36 bp, synthetic construct; identical to SEQ ID NO: 13991
  misc_feature 1..36: note = Synthetic oligonucleotide
  source 1..36: mol_type = other DNA

SEQ ID NO: 28821 - DNA, 34 bp, synthetic construct
  misc_feature 1..34: note = Synthetic oligonucleotide
  source 1..34: mol_type = other DNA
gttgtgttcgatagtacaaagatactaattttaa

SEQ ID NO: 28822 - DNA, 37 bp, synthetic construct
  misc_feature 1..37: note = Synthetic oligonucleotide
  source 1..37: mol_type = other DNA
gttgtgttctagcaaaaatccatatggtaacaaaact

SEQ ID NO: 28823 - DNA, 25 bp, synthetic construct
  misc_feature 1..25: note = Synthetic oligonucleotide
  source 1..25: mol_type = other DNA
gttgtgtttaatatatcaaagatac

SEQ ID NO: 28824 - DNA, 36 bp, synthetic construct; identical to SEQ ID NO: 14003
  misc_feature 1..36: note = Synthetic oligonucleotide
  source 1..36: mol_type = other DNA

SEQ ID NO: 28825 - DNA, 31 bp, synthetic construct
  misc_feature 1..31: note = Synthetic oligonucleotide
  source 1..31: mol_type = other DNA
gttgttaaagaactaagctacttaataattt

SEQ ID NO: 28826 - DNA, 36 bp, synthetic construct
  misc_feature 1..36: note = Synthetic oligonucleotide
  source 1..36: mol_type = other DNA
gttgttactcatactgcaaaggtactcaaatttaag

SEQ ID NO: 28827 - DNA, 36 bp, synthetic construct
  misc_feature 1..36: note = Synthetic oligonucleotide
  source 1..36: mol_type = other DNA
gttgttactgcctgcgttttgaaaggtgaatacaac

SEQ ID NO: 28828 - DNA, 23 bp, synthetic construct
  misc_feature 1..23: note = Synthetic oligonucleotide
  source 1..23: mol_type = other DNA
gttgttatcaatcacaaaactac

SEQ ID NO: 28829 - DNA, 38 bp, synthetic construct
  misc_feature 1..38: note = Synthetic oligonucleotide
  source 1..38: mol_type = other DNA
gttgttatcaatcacaaaattacaagatttgaaagcaa

SEQ ID NO: 28830 - DNA, 38 bp, synthetic construct; identical to SEQ ID NO: 28829
  misc_feature 1..38: note = Synthetic oligonucleotide
  source 1..38: mol_type = other DNA

SEQ ID NO: 28831 - DNA, 38 bp, synthetic construct; identical to SEQ ID NO: 28829
  misc_feature 1..38: note = Synthetic oligonucleotide
  source 1..38: mol_type = other DNA

SEQ ID NO: 28832 - DNA, 34 bp, synthetic construct
  misc_feature 1..34: note = Synthetic oligonucleotide
  source 1..34: mol_type = other DNA
gttgttatcaatcataaaactacaaaatttgaaa

SEQ ID NO: 28833 - DNA, 29 bp, synthetic construct
  misc_feature 1..29: note = Synthetic oligonucleotide
  source 1..29: mol_type = other DNA
gttgttatcaatcgcaaaactacaaaatt

SEQ ID NO: 28834 - DNA, 29 bp, synthetic construct
  misc_feature 1..29: note = Synthetic oligonucleotide
  source 1..29: mol_type = other DNA
gttgttatcaatcgcaaaactacaaaatt

SEQ ID NO: 28835 - DNA, 30 bp, synthetic construct
  misc_feature 1..30: note = Synthetic oligonucleotide
  source 1..30: mol_type = other DNA
gttgttatcaatcgcaaaactacaaaattt

SEQ ID NO: 28836 - DNA, 33 bp, synthetic construct
  misc_feature 1..33: note = Synthetic oligonucleotide
  source 1..33: mol_type = other DNA
gttgttattgataccacaaaggtaagacttttc

SEQ ID NO: 28837 - DNA, 37 bp, synthetic construct
  misc_feature 1..37: note = Synthetic oligonucleotide
  source 1..37: mol_type = other DNA
gttgttattgctaccacaaaggtacgtattttcaagc

SEQ ID NO: 28838 - DNA, 36 bp, synthetic construct; identical to SEQ ID NO: 14035
  misc_feature 1..36: note = Synthetic oligonucleotide
  source 1..36: mol_type = other DNA

SEQ ID NO: 28839 - DNA, 36 bp, synthetic construct
  misc_feature 1..36: note = Synthetic oligonucleotide
  source 1..36: mol_type = other DNA
gttgttcaatatttcaattctacatcaaaccacaac

SEQ ID NO: 28840 - DNA, 36 bp, synthetic construct
  misc_feature 1..36: note = Synthetic oligonucleotide
  source 1..36: mol_type = other DNA
gttgttccgaatatttcaaagatctcaattaaacag

SEQ ID NO: 28841 - DNA, 36 bp, synthetic construct
  misc_feature 1..36: note = Synthetic oligonucleotide
  source 1..36: mol_type = other DNA
gttgttcctcattccaattctacatcaaaccacaac

SEQ ID NO: 28842 - DNA, 36 bp, synthetic construct; identical to SEQ ID NO: 28841
  misc_feature 1..36: note = Synthetic oligonucleotide
  source 1..36: mol_type = other DNA

SEQ ID NO: 28843 - DNA, 36 bp, synthetic construct; identical to SEQ ID NO: 28841
  misc_feature 1..36: note = Synthetic oligonucleotide
  source 1..36: mol_type = other DNA

SEQ ID NO: 28844 - DNA, 36 bp, synthetic construct
  misc_feature 1..36: note = Synthetic oligonucleotide
  source 1..36: mol_type = other DNA
gttgttccttatcaatattctacatcaaaccgcaac

SEQ ID NO: 28845 - DNA, 36 bp, synthetic construct
  misc_feature 1..36: note = Synthetic oligonucleotide
  source 1..36: mol_type = other DNA
gttgttccttatcagtattctacatcaaaccgcaac

SEQ ID NO: 28846 - DNA, 36 bp, synthetic construct
  misc_feature 1..36: note = Synthetic oligonucleotide
  source 1..36: mol_type = other DNA
gttgttccttattctgtttctacatcaaaccacaac

SEQ ID NO: 28847 - DNA, 36 bp, synthetic construct
  misc_feature 1..36: note = Synthetic oligonucleotide
  source 1..36: mol_type = other DNA
gttgttccttattttgtttctacatcaaaccacaac

SEQ ID NO: 28848 - DNA, 36 bp, synthetic construct
  misc_feature 1..36: note = Synthetic oligonucleotide
  source 1..36: mol_type = other DNA
gttgttcttcctatctattctacatcaaaccacaac

SEQ ID NO: 28849 - DNA, 37 bp, synthetic construct
  misc_feature 1..37: note = Synthetic oligonucleotide
  source 1..37: mol_type = other DNA
gttgttgttaaatatagcaaagaacaaatctgaaagc

SEQ ID NO: 28850 - DNA, 36 bp, synthetic construct; identical to SEQ ID NO: 14069
  misc_feature 1..36: note = Synthetic oligonucleotide
  source 1..36: mol_type = other DNA

SEQ ID NO: 28851 - DNA, 36 bp, synthetic construct; identical to SEQ ID NO: 14069
  misc_feature 1..36: note = Synthetic oligonucleotide
  source 1..36: mol_type = other DNA

SEQ ID NO: 28852 - DNA, 36 bp, synthetic construct; identical to SEQ ID NO: 14069
  misc_feature 1..36: note = Synthetic oligonucleotide
  source 1..36: mol_type = other DNA

SEQ ID NO: 28853 - DNA, 36 bp, synthetic construct; identical to SEQ ID NO: 14069
  misc_feature 1..36: note = Synthetic oligonucleotide
  source 1..36: mol_type = other DNA

SEQ ID NO: 28854 - DNA, 36 bp, synthetic construct; identical to SEQ ID NO: 14069
  misc_feature 1..36: note = Synthetic oligonucleotide
  source 1..36: mol_type = other DNA

SEQ ID NO: 28855 - DNA, 36 bp, synthetic construct; identical to SEQ ID NO: 14070
  misc_feature 1..36: note = Synthetic oligonucleotide
  source 1..36: mol_type = other DNA

SEQ ID NO: 28856 - DNA, 37 bp, synthetic construct
  misc_feature 1..37: note = Synthetic oligonucleotide
  source 1..37: mol_type = other DNA
gttgttgttgctaccacaaaggtacgtattttcaagc

SEQ ID NO: 28857 - DNA, 36 bp, synthetic construct
  misc_feature 1..36: note = Synthetic oligonucleotide
  source 1..36: mol_type = other DNA
gttgttgtttgatgtagaaattcaataagatacaac

SEQ ID NO: 28858 - DNA, 36 bp, synthetic construct
  misc_feature 1..36: note = Synthetic oligonucleotide
  source 1..36: mol_type = other DNA
gttgtttacaaagtcaaagatacaattttttgaaag

SEQ ID NO: 28859 - DNA, 24 bp, synthetic construct
  misc_feature 1..24: note = Synthetic oligonucleotide
  source 1..24: mol_type = other DNA
gttgtttatcaagtcaaagataca

SEQ ID NO: 28860 - DNA, 34 bp, synthetic construct
  misc_feature 1..34: note = Synthetic oligonucleotide
  source 1..34: mol_type = other DNA
gttgtttatcaagtcaaagatacaattttttgaa

SEQ ID NO: 28861 - DNA, 36 bp, synthetic construct
  misc_feature 1..36: note = Synthetic oligonucleotide
  source 1..36: mol_type = other DNA
gttgtttatcaatatttcaaagatacaaattaaaag

SEQ ID NO: 28862 - DNA, 36 bp, synthetic construct
  misc_feature 1..36: note = Synthetic oligonucleotide
  source 1..36: mol_type = other DNA
gttgtttatcactctattcctacatcaaaccacaac

SEQ ID NO: 28863 - DNA, 36 bp, synthetic construct; identical to SEQ ID NO: 28862
  misc_feature 1..36: note = Synthetic oligonucleotide
  source 1..36: mol_type = other DNA

SEQ ID NO: 28864 - DNA, 36 bp, synthetic construct; identical to SEQ ID NO: 28862
  misc_feature 1..36: note = Synthetic oligonucleotide
  source 1..36: mol_type = other DNA

SEQ ID NO: 28865 - DNA, 35 bp, synthetic construct
  misc_feature 1..35: note = Synthetic oligonucleotide
  source 1..35: mol_type = other DNA
gttgtttatcagtaagtcaaagatacattttgaaa

SEQ ID NO: 28866 - DNA, 35 bp, synthetic construct; identical to SEQ ID NO: 28865
  misc_feature 1..35: note = Synthetic oligonucleotide
  source 1..35: mol_type = other DNA

SEQ ID NO: 28867 - DNA, 32 bp, synthetic construct; identical to SEQ ID NO: 14091
  misc_feature 1..32: note = Synthetic oligonucleotide
  source 1..32: mol_type = other DNA

SEQ ID NO: 28868 - DNA, 36 bp, synthetic construct
  misc_feature 1..36: note = Synthetic oligonucleotide
  source 1..36: mol_type = other DNA
gttgtttatcatcttgttcctacatcaaaccacaac

SEQ ID NO: 28869 - DNA, 36 bp, synthetic construct; identical to SEQ ID NO: 28868
  misc_feature 1..36: note = Synthetic oligonucleotide
  source 1..36: mol_type = other DNA

SEQ ID NO: 28870 - DNA, 36 bp, synthetic construct; identical to SEQ ID NO: 28868
  misc_feature 1..36: note = Synthetic oligonucleotide
  source 1..36: mol_type = other DNA

SEQ ID NO: 28871 - DNA, 36 bp, synthetic construct
  misc_feature 1..36: note = Synthetic oligonucleotide
  source 1..36: mol_type = other DNA
gttgtttatccttagaaaattacatcaaaccacaac

SEQ ID NO: 28872 - DNA, 36 bp, synthetic construct
  misc_feature 1..36: note = Synthetic oligonucleotide
  source 1..36: mol_type = other DNA
gttgtttatctatctattcctacatcaaaccacaac

SEQ ID NO: 28873 - DNA, 36 bp, synthetic construct; identical to SEQ ID NO: 28872
  misc_feature 1..36: note = Synthetic oligonucleotide
  source 1..36: mol_type = other DNA

SEQ ID NO: 28874 - DNA, 37 bp, synthetic construct
  misc_feature 1..37: note = Synthetic oligonucleotide
  source 1..37: mol_type = other DNA
gttgtttcaaagggcaaagatacaagataattgaaag

SEQ ID NO: 28875 - DNA, 26 bp, synthetic construct
  misc_feature 1..26: note = Synthetic oligonucleotide
  source 1..26: mol_type = other DNA
gttgtttcagactacaaagatacaaa

SEQ ID NO: 28876 - DNA, 30 bp, synthetic construct
  misc_feature 1..30: note = Synthetic oligonucleotide
  source 1..30: mol_type = other DNA
gttgtttcagactacaaagatacaaatttt

SEQ ID NO: 28877 - DNA, 30 bp, synthetic construct; identical to SEQ ID NO: 28876
  misc_feature 1..30: note = Synthetic oligonucleotide
  source 1..30: mol_type = other DNA

SEQ ID NO: 28878 - DNA, 37 bp, synthetic construct
  misc_feature 1..37: note = Synthetic oligonucleotide
  source 1..37: mol_type = other DNA
gttgtttcagatatgtcaaagatacaattttgaaagc

SEQ ID NO: 28879 - DNA, 25 bp, synthetic construct
  misc_feature 1..25: note = Synthetic oligonucleotide
  source 1..25: mol_type = other DNA
gttgtttccaatggttcaaagatac

SEQ ID NO: 28880 - DNA, 35 bp, synthetic construct
  misc_feature 1..35: note = Synthetic oligonucleotide
  source 1..35: mol_type = other DNA
gttgtttccaatggttcaaagatactaaaatgaaa

SEQ ID NO: 28881 - DNA, 30 bp, synthetic construct
  misc_feature 1..30: note = Synthetic oligonucleotide
  source 1..30: mol_type = other DNA
gttgtttccaatggttcaaagatactaatt

SEQ ID NO: 28882 - DNA, 32 bp, synthetic construct
  misc_feature 1..32: note = Synthetic oligonucleotide
  source 1..32: mol_type = other DNA
gttgtttccaatgttccaaagatactaaaatg

SEQ ID NO: 28883 - DNA, 36 bp, synthetic construct
  misc_feature 1..36: note = Synthetic oligonucleotide
  source 1..36: mol_type = other DNA
gttgtttctaatggttcaaatatactaaaatgaaag

SEQ ID NO: 28884 - DNA, 36 bp, synthetic construct; identical to SEQ ID NO: 14115
  misc_feature 1..36: note = Synthetic oligonucleotide
  source 1..36: mol_type = other DNA

SEQ ID NO: 28885 - DNA, 36 bp, synthetic construct; identical to SEQ ID NO: 14115
  misc_feature 1..36: note = Synthetic oligonucleotide
  source 1..36: mol_type = other DNA

SEQ ID NO: 28886 - DNA, 36 bp, synthetic construct; identical to SEQ ID NO: 14115
  misc_feature 1..36: note = Synthetic oligonucleotide
  source 1..36: mol_type = other DNA

SEQ ID NO: 28887 - DNA, 36 bp, synthetic construct; identical to SEQ ID NO: 14115
  misc_feature 1..36: note = Synthetic oligonucleotide
  source 1..36: mol_type = other DNA

SEQ ID NO: 28888 - DNA, 36 bp, synthetic construct; identical to SEQ ID NO: 14115
  misc_feature 1..36: note = Synthetic oligonucleotide
  source 1..36: mol_type = other DNA

SEQ ID NO: 28889 - DNA, 36 bp, synthetic construct
  misc_feature 1..36: note = Synthetic oligonucleotide
  source 1..36: mol_type = other DNA
gttgtttcttatctcatttcatcatcaaaccacaac

SEQ ID NO: 28890 - DNA, 36 bp, synthetic construct
  misc_feature 1..36: note = Synthetic oligonucleotide
  source 1..36: mol_type = other DNA
gttgtttcttatcttgcatctacatcaaaccacaac

SEQ ID NO: 28891 - DNA, 36 bp, synthetic construct; identical to SEQ ID NO: 28890
  misc_feature 1..36: note = Synthetic oligonucleotide
  source 1..36: mol_type = other DNA

SEQ ID NO: 28892 - DNA, 36 bp, synthetic construct; identical to SEQ ID NO: 28890
  misc_feature 1..36: note = Synthetic oligonucleotide
  source 1..36: mol_type = other DNA

SEQ ID NO: 28893 - DNA, 36 bp, synthetic construct
  misc_feature 1..36: note = Synthetic oligonucleotide
  source 1..36: mol_type = other DNA
gttgtttcttatttcttttctacatcaaatcacaac

SEQ ID NO: 28894 - DNA, 37 bp, synthetic construct
  misc_feature 1..37: note = Synthetic oligonucleotide
  source 1..37: mol_type = other DNA
gttgtttgagatcacaaaattacgaatttgaaagcaa

SEQ ID NO: 28895 - DNA, 35 bp, synthetic construct; identical to SEQ ID NO: 14120
  misc_feature 1..35: note = Synthetic oligonucleotide
  source 1..35: mol_type = other DNA

SEQ ID NO: 28896 - DNA, 37 bp, synthetic construct
  misc_feature 1..37: note = Synthetic oligonucleotide
  source 1..37: mol_type = other DNA
gttgtttgagatcacaaagttacgaatttgaaagcaa

SEQ ID NO: 28897 - DNA, 37 bp, synthetic construct; identical to SEQ ID NO: 28896
  misc_feature 1..37: note = Synthetic oligonucleotide
  source 1..37: mol_type = other DNA

SEQ ID NO: 28898 - DNA, 23 bp, synthetic construct
  misc_feature 1..23: note = Synthetic oligonucleotide
  source 1..23: mol_type = other DNA
gttgtttgaggtcacaaaattac

SEQ ID NO: 28899 - DNA, 29 bp, synthetic construct
  misc_feature 1..29: note = Synthetic oligonucleotide
  source 1..29: mol_type = other DNA
gttgtttgaggtcacaaaattacgaattt

SEQ ID NO: 28900 - DNA, 23 bp, synthetic construct
  misc_feature 1..23: note = Synthetic oligonucleotide
  source 1..23: mol_type = other DNA
gttgtttgaggtcacaaagttac

SEQ ID NO: 28901 - DNA, 30 bp, synthetic construct
  misc_feature 1..30: note = Synthetic oligonucleotide
  source 1..30: mol_type = other DNA
gttgtttgaggtcacaaagttacgaatttg

SEQ ID NO: 28902 - DNA, 37 bp, synthetic construct
  misc_feature 1..37: note = Synthetic oligonucleotide
  source 1..37: mol_type = other DNA
gttgtttgaggtcacaaagttacgaatttgaaagcaa

SEQ ID NO: 28903 - DNA, 37 bp, synthetic construct; identical to SEQ ID NO: 28902
  misc_feature 1..37: note = Synthetic oligonucleotide
  source 1..37: mol_type = other DNA

SEQ ID NO: 28904 - DNA, 37 bp, synthetic construct; identical to SEQ ID NO: 28902
  misc_feature 1..37: note = Synthetic oligonucleotide
  source 1..37: mol_type = other DNA

SEQ ID NO: 28905 - DNA, 37 bp, synthetic construct; identical to SEQ ID NO: 28902
  misc_feature 1..37: note = Synthetic oligonucleotide
  source 1..37: mol_type = other DNA

SEQ ID NO: 28906 - DNA, 37 bp, synthetic construct; identical to SEQ ID NO: 28902
  misc_feature 1..37: note = Synthetic oligonucleotide
  source 1..37: mol_type = other DNA

SEQ ID NO: 28907 - DNA, 37 bp, synthetic construct; identical to SEQ ID NO: 28902
  misc_feature 1..37: note = Synthetic oligonucleotide
  source 1..37: mol_type = other DNA

SEQ ID NO: 28908 - DNA, 34 bp, synthetic construct
  misc_feature 1..34: note = Synthetic oligonucleotide
  source 1..34: mol_type = other DNA
gttgtttgcgatactgcaaaagtacgagttttca

SEQ ID NO: 28909 - DNA, 34 bp, synthetic construct; identical to SEQ ID NO: 28908
  misc_feature 1..34: note = Synthetic oligonucleotide
  source 1..34: mol_type = other DNA

SEQ ID NO: 28910 - DNA, 28 bp, synthetic construct
  misc_feature 1..28: note = Synthetic oligonucleotide
  source 1..28: mol_type = other DNA
gttgtttgcgatactgcaaatgtacgat

SEQ ID NO: 28911 - DNA, 35 bp, synthetic construct
  misc_feature 1..35: note = Synthetic oligonucleotide
  source 1..35: mol_type = other DNA
gttgttttagataccacaaaggtacagattttcaa

SEQ ID NO: 28912 - DNA, 30 bp, synthetic construct
  misc_feature 1..30: note = Synthetic oligonucleotide
  source 1..30: mol_type = other DNA
gttgttttcaatggttcaaagatactaatt

SEQ ID NO: 28913 - DNA, 30 bp, synthetic construct; identical to SEQ ID NO: 28912
  misc_feature 1..30: note = Synthetic oligonucleotide
  source 1..30: mol_type = other DNA

SEQ ID NO: 28914 - DNA, 30 bp, synthetic construct; identical to SEQ ID NO: 28912
  misc_feature 1..30: note = Synthetic oligonucleotide
  source 1..30: mol_type = other DNA

SEQ ID NO: 28915 - DNA, 30 bp, synthetic construct; identical to SEQ ID NO: 28912
  misc_feature 1..30: note = Synthetic oligonucleotide
  source 1..30: mol_type = other DNA

SEQ ID NO: 28916 - DNA, 30 bp, synthetic construct; identical to SEQ ID NO: 28912
  misc_feature 1..30: note = Synthetic oligonucleotide
  source 1..30: mol_type = other DNA

SEQ ID NO: 28917 - DNA, 35 bp, synthetic construct
  misc_feature 1..35: note = Synthetic oligonucleotide
  source 1..35: mol_type = other DNA
gttgttttcaatggttcaaagatactaatttgaaa

SEQ ID NO: 28918 - DNA, 36 bp, synthetic construct; identical to SEQ ID NO: 14143
  misc_feature 1..36: note = Synthetic oligonucleotide
  source 1..36: mol_type = other DNA

SEQ ID NO: 28919 - DNA, 36 bp, synthetic construct; identical to SEQ ID NO: 14145
  misc_feature 1..36: note = Synthetic oligonucleotide
  source 1..36: mol_type = other DNA

SEQ ID NO: 28920 - DNA, 36 bp, synthetic construct; identical to SEQ ID NO: 14145
  misc_feature 1..36: note = Synthetic oligonucleotide
  source 1..36: mol_type = other DNA

SEQ ID NO: 28921 - DNA, 36 bp, synthetic construct; identical to SEQ ID NO: 14145
  misc_feature 1..36: note = Synthetic oligonucleotide
  source 1..36: mol_type = other DNA

SEQ ID NO: 28922 - DNA, 36 bp, synthetic construct
  misc_feature 1..36: note = Synthetic oligonucleotide
  source 1..36: mol_type = other DNA
gtttaaaatccttccgtattaacaagactctcaaac

SEQ ID NO: 28923 - DNA, 36 bp, synthetic construct; identical to SEQ ID NO: 28922
  misc_feature 1..36: note = Synthetic oligonucleotide
  source 1..36: mol_type = other DNA

SEQ ID NO: 28924 - DNA, 36 bp, synthetic construct; identical to SEQ ID NO: 28922
  misc_feature 1..36: note = Synthetic oligonucleotide
  source 1..36: mol_type = other DNA

SEQ ID NO: 28925 - DNA, 36 bp, synthetic construct; identical to SEQ ID NO: 28922
  misc_feature 1..36: note = Synthetic oligonucleotide
  source 1..36: mol_type = other DNA

SEQ ID NO: 28926 - DNA, 36 bp, synthetic construct; identical to SEQ ID NO: 28922
  misc_feature 1..36: note = Synthetic oligonucleotide
  source 1..36: mol_type = other DNA

SEQ ID NO: 28927 - DNA, 36 bp, synthetic construct; identical to SEQ ID NO: 28922
  misc_feature 1..36: note = Synthetic oligonucleotide
  source 1..36: mol_type = other DNA

SEQ ID NO: 28928 - DNA, 36 bp, synthetic construct
  misc_feature 1..36: note = Synthetic oligonucleotide
  source 1..36: mol_type = other DNA
gtttaaatactatctgaatttaaactgctctcaaac

SEQ ID NO: 28929 - DNA, 36 bp, synthetic construct
  misc_feature 1..36: note = Synthetic oligonucleotide
  source 1..36: mol_type = other DNA
gtttaaattccttccgtattaacaagactctcaaac

SEQ ID NO: 28930 - DNA, 36 bp, synthetic construct; identical to SEQ ID NO: 28929
  misc_feature 1..36: note = Synthetic oligonucleotide
  source 1..36: mol_type = other DNA

SEQ ID NO: 28931 - DNA, 36 bp, synthetic construct; identical to SEQ ID NO: 14148
  misc_feature 1..36: note = Synthetic oligonucleotide
  source 1..36: mol_type = other DNA

SEQ ID NO: 28932 - DNA, 36 bp, synthetic construct
  misc_feature 1..36: note = Synthetic oligonucleotide
  source 1..36: mol_type = other DNA
gtttaagaactatacaaaactacactactctcaaac

SEQ ID NO: 28933 - DNA, 36 bp, synthetic construct; identical to SEQ ID NO: 14149
  misc_feature 1..36: note = Synthetic oligonucleotide
  source 1..36: mol_type = other DNA

SEQ ID NO: 28934 - DNA, 36 bp, synthetic construct
  misc_feature 1..36: note = Synthetic oligonucleotide
  source 1..36: mol_type = other DNA
gtttaagacctcttcgaaattacactactctcaaac

SEQ ID NO: 28935 - DNA, 36 bp, synthetic construct
  misc_feature 1..36: note = Synthetic oligonucleotide
  source 1..36: mol_type = other DNA
gtttaagagtattccaaaataacaaggctctcaaac

SEQ ID NO: 28936 - DNA, 36 bp, synthetic construct
  misc_feature 1..36: note = Synthetic oligonucleotide
  source 1..36: mol_type = other DNA
gtttaagagtattcccaaataacaaggctctcaaac

SEQ ID NO: 28937 - DNA, 36 bp, synthetic construct
  misc_feature 1..36: note = Synthetic oligonucleotide
  source 1..36: mol_type = other DNA
gtttaagatacctctgaaattacactactctcaaac

SEQ ID NO: 28938 - DNA, 36 bp, synthetic construct
  misc_feature 1..36: note = Synthetic oligonucleotide
  source 1..36: mol_type = other DNA
gtttaagtaccatacatttttacatcattctcaaac

SEQ ID NO: 28939 - DNA, 36 bp, synthetic construct
  misc_feature 1..36: note = Synthetic oligonucleotide
  source 1..36: mol_type = other DNA
gtttaagtaccctataaaattacactactctcaaac

SEQ ID NO: 28940 - DNA, 27 bp, synthetic construct
  misc_feature 1..27: note = Synthetic oligonucleotide
  source 1..27: mol_type = other DNA
gtttaataaccctatataatttctact

SEQ ID NO: 28941 - DNA, 27 bp, synthetic construct
  misc_feature 1..27: note = Synthetic oligonucleotide
  source 1..27: mol_type = other DNA
gtttaataaccctatataatttctact

SEQ ID NO: 28942 - DNA, 36 bp, synthetic construct
  misc_feature 1..36: note = Synthetic oligonucleotide
  source 1..36: mol_type = other DNA
gtttaataaccctatataatttctactattgtagat

SEQ ID NO: 28943 - DNA, 36 bp, synthetic construct; identical to SEQ ID NO: 28942
  misc_feature 1..36: note = Synthetic oligonucleotide
  source 1..36: mol_type = other DNA

SEQ ID NO: 28944 - DNA, 36 bp, synthetic construct; identical to SEQ ID NO: 28942
  misc_feature 1..36: note = Synthetic oligonucleotide
  source 1..36: mol_type = other DNA

SEQ ID NO: 28945 - DNA, 36 bp, synthetic construct; identical to SEQ ID NO: 28942
  misc_feature 1..36: note = Synthetic oligonucleotide
  source 1..36: mol_type = other DNA

SEQ ID NO: 28946 - DNA, 36 bp, synthetic construct; identical to SEQ ID NO: 28942
  misc_feature 1..36: note = Synthetic oligonucleotide
  source 1..36: mol_type = other DNA

SEQ ID NO: 28947 - DNA, 36 bp, synthetic construct
  misc_feature 1..36: note = Synthetic oligonucleotide
  source 1..36: mol_type = other DNA
gtttaataccactatataatttctactattgtagat

SEQ ID NO: 28948 - DNA, 36 bp, synthetic construct; identical to SEQ ID NO: 28947
  misc_feature 1..36: note = Synthetic oligonucleotide
  source 1..36: mol_type = other DNA

SEQ ID NO: 28949 - DNA, 36 bp, synthetic construct
  misc_feature 1..36: note = Synthetic oligonucleotide
  source 1..36: mol_type = other DNA
gtttaatagccctatataatttctactattgtagat

SEQ ID NO: 28950 - DNA, 36 bp, synthetic construct
  misc_feature 1..36: note = Synthetic oligonucleotide
  source 1..36: mol_type = other DNA
gtttaattaccagtcaggacgtcactacaccaaaac

SEQ ID NO: 28951 - DNA, 36 bp, synthetic construct
  misc_feature 1..36: note = Synthetic oligonucleotide
  source 1..36: mol_type = other DNA
gtttactacccacttgatttaacatacctagcaaac

SEQ ID NO: 28952 - DNA, 19 bp, synthetic construct
  misc_feature 1..19: note = Synthetic oligonucleotide
  source 1..19: mol_type = other DNA
gtttagaggacaccacttt

SEQ ID NO: 28953 - DNA, 36 bp, synthetic construct
  misc_feature 1..36: note = Synthetic oligonucleotide
  source 1..36: mol_type = other DNA
gtttaggactactctgaaattacactactctcaaac

SEQ ID NO: 28954 - DNA, 36 bp, synthetic construct; identical to SEQ ID NO: 28953
  misc_feature 1..36: note = Synthetic oligonucleotide
  source 1..36: mol_type = other DNA

SEQ ID NO: 28955 - DNA, 36 bp, synthetic construct
  misc_feature 1..36: note = Synthetic oligonucleotide
  source 1..36: mol_type = other DNA
gtttaggattgatcgcaggctggggtcgattacact

SEQ ID NO: 28956 - DNA, 36 bp, synthetic construct
  misc_feature 1..36: note = Synthetic oligonucleotide
  source 1..36: mol_type = other DNA
gtttagtagaattcaaaattcacatatctctcaaac

SEQ ID NO: 28957 - DNA, 36 bp, synthetic construct; identical to SEQ ID NO: 14158
  misc_feature 1..36: note = Synthetic oligonucleotide
  source 1..36: mol_type = other DNA

SEQ ID NO: 28958 - DNA, 36 bp, synthetic construct; identical to SEQ ID NO: 14158
  misc_feature 1..36: note = Synthetic oligonucleotide
  source 1..36: mol_type = other DNA

SEQ ID NO: 28959 - DNA, 36 bp, synthetic construct; identical to SEQ ID NO: 14158
  misc_feature 1..36: note = Synthetic oligonucleotide
  source 1..36: mol_type = other DNA

SEQ ID NO: 28960 - DNA, 36 bp, synthetic construct; identical to SEQ ID NO: 14158
  misc_feature 1..36: note = Synthetic oligonucleotide
  source 1..36: mol_type = other DNA

SEQ ID NO: 28961 - DNA, 36 bp, synthetic construct
  misc_feature 1..36: note = Synthetic oligonucleotide
  source 1..36: mol_type = other DNA
gtttagttaccagtcagaatgtcactaagccaaaac

SEQ ID NO: 28962 - DNA, 36 bp, synthetic construct; identical to SEQ ID NO: 14161
  misc_feature 1..36: note = Synthetic oligonucleotide
  source 1..36: mol_type = other DNA

SEQ ID NO: 28963 - DNA, 35 bp, synthetic construct
  misc_feature 1..35: note = Synthetic oligonucleotide
  source 1..35: mol_type = other DNA
gtttcaaagatcggatttcgttatcaatccacaac

SEQ ID NO: 28964 - DNA, 35 bp, synthetic construct; identical to SEQ ID NO: 28963
  misc_feature 1..35: note = Synthetic oligonucleotide
  source 1..35: mol_type = other DNA

SEQ ID NO: 28965 - DNA, 36 bp, synthetic construct; identical to SEQ ID NO: 14169
  misc_feature 1..36: note = Synthetic oligonucleotide
  source 1..36: mol_type = other DNA

SEQ ID NO: 28966 - DNA, 37 bp, synthetic construct
  misc_feature 1..37: note = Synthetic oligonucleotide
  source 1..37: mol_type = other DNA
gtttcaatcaaactgattccgacacaatcgttgcgac

SEQ ID NO: 28967 - DNA, 37 bp, synthetic construct
  misc_feature 1..37: note = Synthetic oligonucleotide
  source 1..37: mol_type = other DNA
gtttcaatcaaactgatttcagatggtcattgtgacc

SEQ ID NO: 28968 - DNA, 36 bp, synthetic construct
  misc_feature 1..36: note = Synthetic oligonucleotide
  source 1..36: mol_type = other DNA
gtttcaatcaaactgatttccgatagtcatggcgac

SEQ ID NO: 28969 - DNA, 37 bp, synthetic construct
  misc_feature 1..37: note = Synthetic oligonucleotide
  source 1..37: mol_type = other DNA
gtttcaatcaaactgatttcttgcagtcacttgcgac

SEQ ID NO: 28970 - DNA, 36 bp, synthetic construct
  misc_feature 1..36: note = Synthetic oligonucleotide
  source 1..36: mol_type = other DNA
gtttcaatcaaccgatatcttcacattcattgtgac

SEQ ID NO: 28971 - DNA, 37 bp, synthetic construct
  misc_feature 1..37: note = Synthetic oligonucleotide
  source 1..37: mol_type = other DNA
gtttcaatcaagctgattctcaaacagtcattgcgac

SEQ ID NO: 28972 - DNA, 22 bp, synthetic construct
  misc_feature 1..22: note = Synthetic oligonucleotide
  source 1..22: mol_type = other DNA
gtttcaatccacgcaccccggg

SEQ ID NO: 28973 - DNA, 31 bp, synthetic construct
  misc_feature 1..31: note = Synthetic oligonucleotide
  source 1..31: mol_type = other DNA
gtttcaatccacgcacccgtgagggtgcgac

SEQ ID NO: 28974 - DNA, 31 bp, synthetic construct
  misc_feature 1..31: note = Synthetic oligonucleotide
  source 1..31: mol_type = other DNA
gtttcaatccacgcactcatgagagtgcgac

SEQ ID NO: 28975 - DNA, 33 bp, synthetic construct
  misc_feature 1..33: note = Synthetic oligonucleotide
  source 1..33: mol_type = other DNA
gtttcaatccacgcactccttgcggagtgcgac

SEQ ID NO: 28976 - DNA, 33 bp, synthetic construct; identical to SEQ ID NO: 28975
  misc_feature 1..33: note = Synthetic oligonucleotide
  source 1..33: mol_type = other DNA

SEQ ID NO: 28977 - DNA, 33 bp, synthetic construct; identical to SEQ ID NO: 28975
  misc_feature 1..33: note = Synthetic oligonucleotide
  source 1..33: mol_type = other DNA

SEQ ID NO: 28978 - DNA, 30 bp, synthetic construct
  misc_feature 1..30: note = Synthetic oligonucleotide
  source 1..30: mol_type = other DNA
gtttcaatcccagattggttcgattaagac

SEQ ID NO: 28979 - DNA, 36 bp, synthetic construct; identical to SEQ ID NO: 14172
  misc_feature 1..36: note = Synthetic oligonucleotide
  source 1..36: mol_type = other DNA

SEQ ID NO: 28980 - DNA, 36 bp, synthetic construct; identical to SEQ ID NO: 14174
  misc_feature 1..36: note = Synthetic oligonucleotide
  source 1..36: mol_type = other DNA

SEQ ID NO: 28981 - DNA, 36 bp, synthetic construct
  misc_feature 1..36: note = Synthetic oligonucleotide
  source 1..36: mol_type = other DNA
gtttcaattaaactgatttcagacagtcgttgcgac

SEQ ID NO: 28982 - DNA, 32 bp, synthetic construct; identical to SEQ ID NO: 14175
  misc_feature 1..32: note = Synthetic oligonucleotide
  source 1..32: mol_type = other DNA

SEQ ID NO: 28983 - DNA, 32 bp, synthetic construct; identical to SEQ ID NO: 14175
  misc_feature 1..32: note = Synthetic oligonucleotide
  source 1..32: mol_type = other DNA

SEQ ID NO: 28984 - DNA, 36 bp, synthetic construct
  misc_feature 1..36: note = Synthetic oligonucleotide
  source 1..36: mol_type = other DNA
gtttcacacctttacaaacttacaaggttctcaaac

SEQ ID NO: 28985 - DNA, 36 bp, synthetic construct
  misc_feature 1..36: note = Synthetic oligonucleotide
  source 1..36: mol_type = other DNA
gtttcacacctttatttacttacaaggttctcaaac

SEQ ID NO: 28986 - DNA, 36 bp, synthetic construct; identical to SEQ ID NO: 28985
  misc_feature 1..36: note = Synthetic oligonucleotide
  source 1..36: mol_type = other DNA

SEQ ID NO: 28987 - DNA, 36 bp, synthetic construct
  misc_feature 1..36: note = Synthetic oligonucleotide
  source 1..36: mol_type = other DNA
gtttcactaccataagggattacactactctcaaac

SEQ ID NO: 28988 - DNA, 36 bp, synthetic construct
  misc_feature 1..36: note = Synthetic oligonucleotide
  source 1..36: mol_type = other DNA
gtttcactaccttatgaatttacactattctcaaac

SEQ ID NO: 28989 - DNA, 36 bp, synthetic construct
  misc_feature 1..36: note = Synthetic oligonucleotide
  source 1..36: mol_type = other DNA
gtttcactaccttatggatttacactattctcaaac

SEQ ID NO: 28990 - DNA, 36 bp, synthetic construct; identical to SEQ ID NO: 28989
  misc_feature 1..36: note = Synthetic oligonucleotide
  source 1..36: mol_type = other DNA

SEQ ID NO: 28991 - DNA, 36 bp, synthetic construct; identical to SEQ ID NO: 28989
  misc_feature 1..36: note = Synthetic oligonucleotide
  source 1..36: mol_type = other DNA

SEQ ID NO: 28992 - DNA, 36 bp, synthetic construct; identical to SEQ ID NO: 28989
  misc_feature 1..36: note = Synthetic oligonucleotide
  source 1..36: mol_type = other DNA

SEQ ID NO: 28993 - DNA, 36 bp, synthetic construct; identical to SEQ ID NO: 28989
  misc_feature 1..36: note = Synthetic oligonucleotide
  source 1..36: mol_type = other DNA

SEQ ID NO: 28994 - DNA, 36 bp, synthetic construct; identical to SEQ ID NO: 14180
  misc_feature 1..36: note = Synthetic oligonucleotide
  source 1..36: mol_type = other DNA

SEQ ID NO: 28995 - DNA, 36 bp, synthetic construct; identical to SEQ ID NO: 14180
  misc_feature 1..36: note = Synthetic oligonucleotide
  source 1..36: mol_type = other DNA

SEQ ID NO: 28996 - DNA, 36 bp, synthetic construct
  misc_feature 1..36: note = Synthetic oligonucleotide
  source 1..36: mol_type = other DNA
gtttcagaaccctacagaatcacaccattctcaaac

SEQ ID NO: 28997 - DNA, 36 bp, synthetic construct
  misc_feature 1..36: note = Synthetic oligonucleotide
  source 1..36: mol_type = other DNA
gtttcagaaccttaacaatcgttaaggctgtagttc

SEQ ID NO: 28998 - DNA, 36 bp, synthetic construct; identical to SEQ ID NO: 14181
  misc_feature 1..36: note = Synthetic oligonucleotide
  source 1..36: mol_type = other DNA

SEQ ID NO: 28999 - DNA, 34 bp, synthetic construct
  misc_feature 1..34: note = Synthetic oligonucleotide
  source 1..34: mol_type = other DNA
gtttcagaagcctgtcagatcaatgacctagacc

SEQ ID NO: 29000 - DNA, 36 bp, synthetic construct; identical to SEQ ID NO: 14182
  misc_feature 1..36: note = Synthetic oligonucleotide
  source 1..36: mol_type = other DNA

SEQ ID NO: 29001 - DNA, 36 bp, synthetic construct; identical to SEQ ID NO: 14182
  misc_feature 1..36: note = Synthetic oligonucleotide
  source 1..36: mol_type = other DNA

SEQ ID NO: 29002 - DNA, 36 bp, synthetic construct; identical to SEQ ID NO: 14182
  misc_feature 1..36: note = Synthetic oligonucleotide
  source 1..36: mol_type = other DNA

SEQ ID NO: 29003 - DNA, 36 bp, synthetic construct; identical to SEQ ID NO: 14182
  misc_feature 1..36: note = Synthetic oligonucleotide
  source 1..36: mol_type = other DNA

SEQ ID NO: 29004 - DNA, 36 bp, synthetic construct; identical to SEQ ID NO: 14182
  misc_feature 1..36: note = Synthetic oligonucleotide
  source 1..36: mol_type = other DNA

SEQ ID NO: 29005 - DNA, 36 bp, synthetic construct; identical to SEQ ID NO: 14182
  misc_feature 1..36: note = Synthetic oligonucleotide
  source 1..36: mol_type = other DNA

SEQ ID NO: 29006 - DNA, 36 bp, synthetic construct; identical to SEQ ID NO: 14182
  misc_feature 1..36: note = Synthetic oligonucleotide
  source 1..36: mol_type = other DNA

SEQ ID NO: 29007 - DNA, 36 bp, synthetic construct; identical to SEQ ID NO: 14182
  misc_feature 1..36: note = Synthetic oligonucleotide
  source 1..36: mol_type = other DNA

SEQ ID NO: 29008 - DNA, 36 bp, synthetic construct; identical to SEQ ID NO: 14182
  misc_feature 1..36: note = Synthetic oligonucleotide
  source 1..36: mol_type = other DNA

SEQ ID NO: 29009 - DNA, 36 bp, synthetic construct; identical to SEQ ID NO: 14182
  misc_feature 1..36: note = Synthetic oligonucleotide
  source 1..36: mol_type = other DNA

SEQ ID NO: 29010 - DNA, 36 bp, synthetic construct; identical to SEQ ID NO: 14182
  misc_feature 1..36: note = Synthetic oligonucleotide
  source 1..36: mol_type = other DNA

SEQ ID NO: 29011 - DNA, 36 bp, synthetic construct; identical to SEQ ID NO: 14182
  misc_feature 1..36: note = Synthetic oligonucleotide
  source 1..36: mol_type = other DNA

SEQ ID NO: 29012 - DNA, 36 bp, synthetic construct; identical to SEQ ID NO: 14182
  misc_feature 1..36: note = Synthetic oligonucleotide
  source 1..36: mol_type = other DNA

SEQ ID NO: 29013 - DNA, 36 bp, synthetic construct; identical to SEQ ID NO: 14182
  misc_feature 1..36: note = Synthetic oligonucleotide
  source 1..36: mol_type = other DNA

SEQ ID NO: 29014 - DNA, 36 bp, synthetic construct; identical to SEQ ID NO: 14182
  misc_feature 1..36: note = Synthetic oligonucleotide
  source 1..36: mol_type = other DNA

SEQ ID NO: 29015 - DNA, 36 bp, synthetic construct; identical to SEQ ID NO: 14182
  misc_feature 1..36: note = Synthetic oligonucleotide
  source 1..36: mol_type = other DNA

SEQ ID NO: 29016 - DNA, 36 bp, synthetic construct; identical to SEQ ID NO: 14182
  misc_feature 1..36: note = Synthetic oligonucleotide
  source 1..36: mol_type = other DNA

SEQ ID NO: 29017 - DNA, 36 bp, synthetic construct; identical to SEQ ID NO: 14182
  misc_feature 1..36: note = Synthetic oligonucleotide
  source 1..36: mol_type = other DNA

SEQ ID NO: 29018 - DNA, 36 bp, synthetic construct; identical to SEQ ID NO: 14183
  misc_feature 1..36: note = Synthetic oligonucleotide
  source 1..36: mol_type = other DNA

SEQ ID NO: 29019 - DNA, 36 bp, synthetic construct; identical to SEQ ID NO: 14183
  misc_feature 1..36: note = Synthetic oligonucleotide
  source 1..36: mol_type = other DNA

SEQ ID NO: 29020 - DNA, 37 bp, synthetic construct
  misc_feature 1..37: note = Synthetic oligonucleotide
  source 1..37: mol_type = other DNA
gtttcagacacccttaacttccgtcggtcattgcgac

SEQ ID NO: 29021 - DNA, 36 bp, synthetic construct; identical to SEQ ID NO: 14186
  misc_feature 1..36: note = Synthetic oligonucleotide
  source 1..36: mol_type = other DNA

SEQ ID NO: 29022 - DNA, 36 bp, synthetic construct; identical to SEQ ID NO: 14186
  misc_feature 1..36: note = Synthetic oligonucleotide
  source 1..36: mol_type = other DNA

SEQ ID NO: 29023 - DNA, 36 bp, synthetic construct; identical to SEQ ID NO: 14186
  misc_feature 1..36: note = Synthetic oligonucleotide
  source 1..36: mol_type = other DNA

SEQ ID NO: 29024 - DNA, 36 bp, synthetic construct; identical to SEQ ID NO: 14186
  misc_feature 1..36: note = Synthetic oligonucleotide
  source 1..36: mol_type = other DNA

SEQ ID NO: 29025 - DNA, 36 bp, synthetic construct; identical to SEQ ID NO: 14186
  misc_feature 1..36: note = Synthetic oligonucleotide
  source 1..36: mol_type = other DNA

SEQ ID NO: 29026 - DNA, 36 bp, synthetic construct; identical to SEQ ID NO: 14186
  misc_feature 1..36: note = Synthetic oligonucleotide
  source 1..36: mol_type = other DNA

SEQ ID NO: 29027 - DNA, 36 bp, synthetic construct; identical to SEQ ID NO: 14188
  misc_feature 1..36: note = Synthetic oligonucleotide
  source 1..36: mol_type = other DNA

SEQ ID NO: 29028 - DNA, 36 bp, synthetic construct; identical to SEQ ID NO: 14188
  misc_feature 1..36: note = Synthetic oligonucleotide
  source 1..36: mol_type = other DNA

SEQ ID NO: 29029 - DNA, 36 bp, synthetic construct; identical to SEQ ID NO: 14188
  misc_feature 1..36: note = Synthetic oligonucleotide
  source 1..36: mol_type = other DNA

SEQ ID NO: 29030 - DNA, 36 bp, synthetic construct; identical to SEQ ID NO: 14188
  misc_feature 1..36: note = Synthetic oligonucleotide
  source 1..36: mol_type = other DNA

SEQ ID NO: 29031 - DNA, 36 bp, synthetic construct; identical to SEQ ID NO: 14188
  misc_feature 1..36: note = Synthetic oligonucleotide
  source 1..36: mol_type = other DNA

SEQ ID NO: 29032 - DNA, 36 bp, synthetic construct; identical to SEQ ID NO: 14188
  misc_feature 1..36: note = Synthetic oligonucleotide
  source 1..36: mol_type = other DNA

SEQ ID NO: 29033 - DNA, 36 bp, synthetic construct; identical to SEQ ID NO: 14188
  misc_feature 1..36: note = Synthetic oligonucleotide
  source 1..36: mol_type = other DNA

SEQ ID NO: 29034 - DNA, 36 bp, synthetic construct; identical to SEQ ID NO: 14188
  misc_feature 1..36: note = Synthetic oligonucleotide
  source 1..36: mol_type = other DNA

SEQ ID NO: 29035 - DNA, 36 bp, synthetic construct; identical to SEQ ID NO: 14188
  misc_feature 1..36: note = Synthetic oligonucleotide
  source 1..36: mol_type = other DNA

SEQ ID NO: 29036 - DNA, 36 bp, synthetic construct; identical to SEQ ID NO: 14188
  misc_feature 1..36: note = Synthetic oligonucleotide
  source 1..36: mol_type = other DNA

SEQ ID NO: 29037 - DNA, 36 bp, synthetic construct; identical to SEQ ID NO: 14188
  misc_feature 1..36: note = Synthetic oligonucleotide
  source 1..36: mol_type = other DNA

SEQ ID NO: 29038 - DNA, 36 bp, synthetic construct; identical to SEQ ID NO: 14188
  misc_feature 1..36: note = Synthetic oligonucleotide
  source 1..36: mol_type = other DNA

SEQ ID NO: 29039 - DNA, 36 bp, synthetic construct
  misc_feature 1..36: note = Synthetic oligonucleotide
  source 1..36: mol_type = other DNA
gtttcagccaaccagatttttcctctccgttgcgat

SEQ ID NO: 29040 - DNA, 37 bp, synthetic construct
  misc_feature 1..37: note = Synthetic oligonucleotide
  source 1..37: mol_type = other DNA
gtttcagccaccctgaacttctcaactccgttgagac

SEQ ID NO: 29041 - DNA, 37 bp, synthetic construct; identical to SEQ ID NO: 29040
  misc_feature 1..37: note = Synthetic oligonucleotide
  source 1..37: mol_type = other DNA

SEQ ID NO: 29042 - DNA, 37 bp, synthetic construct; identical to SEQ ID NO: 29040
  misc_feature 1..37: note = Synthetic oligonucleotide
  source 1..37: mol_type = other DNA

SEQ ID NO: 29043 - DNA, 36 bp, synthetic construct
  misc_feature 1..36: note = Synthetic oligonucleotide
  source 1..36: mol_type = other DNA
gtttcagcttgacaccaaaaccttatagagtgatat

SEQ ID NO: 29044 - DNA, 36 bp, synthetic construct
  misc_feature 1..36: note = Synthetic oligonucleotide
  source 1..36: mol_type = other DNA
gtttcagcttgacaccaaacagctatagagtgatat

SEQ ID NO: 29045 - DNA, 37 bp, synthetic construct
  misc_feature 1..37: note = Synthetic oligonucleotide
  source 1..37: mol_type = other DNA
gtttcaggcgacacgaacttttccaactgcctgcatc

SEQ ID NO: 29046 - DNA, 36 bp, synthetic construct; identical to SEQ ID NO: 14191
  misc_feature 1..36: note = Synthetic oligonucleotide
  source 1..36: mol_type = other DNA

SEQ ID NO: 29047 - DNA, 36 bp, synthetic construct; identical to SEQ ID NO: 14191
  misc_feature 1..36: note = Synthetic oligonucleotide
  source 1..36: mol_type = other DNA

SEQ ID NO: 29048 - DNA, 36 bp, synthetic construct; identical to SEQ ID NO: 14191
  misc_feature 1..36: note = Synthetic oligonucleotide
  source 1..36: mol_type = other DNA

SEQ ID NO: 29049 - DNA, 36 bp, synthetic construct; identical to SEQ ID NO: 14191
  misc_feature 1..36: note = Synthetic oligonucleotide
  source 1..36: mol_type = other DNA

SEQ ID NO: 29050 - DNA, 36 bp, synthetic construct; identical to SEQ ID NO: 14191
  misc_feature 1..36: note = Synthetic oligonucleotide
  source 1..36: mol_type = other DNA

SEQ ID NO: 29051 - DNA, 36 bp, synthetic construct; identical to SEQ ID NO: 14191
  misc_feature 1..36: note = Synthetic oligonucleotide
  source 1..36: mol_type = other DNA

SEQ ID NO: 29052 - DNA, 36 bp, synthetic construct; identical to SEQ ID NO: 14191
  misc_feature 1..36: note = Synthetic oligonucleotide
  source 1..36: mol_type = other DNA

SEQ ID NO: 29053 - DNA, 36 bp, synthetic construct
  misc_feature 1..36: note = Synthetic oligonucleotide
  source 1..36: mol_type = other DNA
gtttcagtaccttataaaattacactactctcaaac

SEQ ID NO: 29054 - DNA, 36 bp, synthetic construct
  misc_feature 1..36: note = Synthetic oligonucleotide
  source 1..36: mol_type = other DNA
gtttcagtaccttatgaaattacactactctcaaac

SEQ ID NO: 29055 - DNA, 36 bp, synthetic construct; identical to SEQ ID NO: 29054
  misc_feature 1..36: note = Synthetic oligonucleotide
  source 1..36: mol_type = other DNA

SEQ ID NO: 29056 - DNA, 36 bp, synthetic construct; identical to SEQ ID NO: 29054
  misc_feature 1..36: note = Synthetic oligonucleotide
  source 1..36: mol_type = other DNA

SEQ ID NO: 29057 - DNA, 36 bp, synthetic construct; identical to SEQ ID NO: 29054
  misc_feature 1..36: note = Synthetic oligonucleotide
  source 1..36: mol_type = other DNA

SEQ ID NO: 29058 - DNA, 36 bp, synthetic construct; identical to SEQ ID NO: 29054
  misc_feature 1..36: note = Synthetic oligonucleotide
  source 1..36: mol_type = other DNA

SEQ ID NO: 29059 - DNA, 36 bp, synthetic construct; identical to SEQ ID NO: 29054
  misc_feature 1..36: note = Synthetic oligonucleotide
  source 1..36: mol_type = other DNA

SEQ ID NO: 29060 - DNA, 36 bp, synthetic construct; identical to SEQ ID NO: 29054
  misc_feature 1..36: note = Synthetic oligonucleotide
  source 1..36: mol_type = other DNA

SEQ ID NO: 29061 - DNA, 36 bp, synthetic construct; identical to SEQ ID NO: 29054
  misc_feature 1..36: note = Synthetic oligonucleotide
  source 1..36: mol_type = other DNA

SEQ ID NO: 29062 - DNA, 36 bp, synthetic construct; identical to SEQ ID NO: 29054
  misc_feature 1..36: note = Synthetic oligonucleotide
  source 1..36: mol_type = other DNA

SEQ ID NO: 29063 - DNA, 36 bp, synthetic construct; identical to SEQ ID NO: 29054
  misc_feature 1..36: note = Synthetic oligonucleotide
  source 1..36: mol_type = other DNA

SEQ ID NO: 29064 - DNA, 36 bp, synthetic construct; identical to SEQ ID NO: 29054
  misc_feature 1..36: note = Synthetic oligonucleotide
  source 1..36: mol_type = other DNA

SEQ ID NO: 29065 - DNA, 36 bp, synthetic construct; identical to SEQ ID NO: 29054
  misc_feature 1..36: note = Synthetic oligonucleotide
  source 1..36: mol_type = other DNA

SEQ ID NO: 29066 - DNA, 36 bp, synthetic construct; identical to SEQ ID NO: 29054
  misc_feature 1..36: note = Synthetic oligonucleotide
  source 1..36: mol_type = other DNA

SEQ ID NO: 29067 - DNA, 36 bp, synthetic construct; identical to SEQ ID NO: 29054
  misc_feature 1..36: note = Synthetic oligonucleotide
  source 1..36: mol_type = other DNA

SEQ ID NO: 29068 - DNA, 36 bp, synthetic construct; identical to SEQ ID NO: 29054
  misc_feature 1..36: note = Synthetic oligonucleotide
  source 1..36: mol_type = other DNA

SEQ ID NO: 29069 - DNA, 36 bp, synthetic construct; identical to SEQ ID NO: 29054
  misc_feature 1..36: note = Synthetic oligonucleotide
  source 1..36: mol_type = other DNA

SEQ ID NO: 29070 - DNA, 36 bp, synthetic construct; identical to SEQ ID NO: 29054
  misc_feature 1..36: note = Synthetic oligonucleotide
  source 1..36: mol_type = other DNA

SEQ ID NO: 29071 - DNA, 36 bp, synthetic construct
  misc_feature 1..36: note = Synthetic oligonucleotide
  source 1..36: mol_type = other DNA
gtttcagtaccttatgaaattatactactctcaaac

SEQ ID NO: 29072 - DNA, 36 bp, synthetic construct
  misc_feature 1..36: note = Synthetic oligonucleotide
  source 1..36: mol_type = other DNA
gtttcagtaccttatggaattacactactctcaaac

SEQ ID NO: 29073 - DNA, 36 bp, synthetic construct; identical to SEQ ID NO: 29072
  misc_feature 1..36: note = Synthetic oligonucleotide
  source 1..36: mol_type = other DNA

SEQ ID NO: 29074 - DNA, 36 bp, synthetic construct
  misc_feature 1..36: note = Synthetic oligonucleotide
  source 1..36: mol_type = other DNA
gtttcagtactattaaatataacactactactgtaa

SEQ ID NO: 29075 - DNA, 36 bp, synthetic construct; identical to SEQ ID NO: 14193
  misc_feature 1..36: note = Synthetic oligonucleotide
  source 1..36: mol_type = other DNA

SEQ ID NO: 29076 - DNA, 36 bp, synthetic construct; identical to SEQ ID NO: 14193
  misc_feature 1..36: note = Synthetic oligonucleotide
  source 1..36: mol_type = other DNA

SEQ ID NO: 29077 - DNA, 36 bp, synthetic construct; identical to SEQ ID NO: 14193
  misc_feature 1..36: note = Synthetic oligonucleotide
  source 1..36: mol_type = other DNA

SEQ ID NO: 29078 - DNA, 36 bp, synthetic construct; identical to SEQ ID NO: 14193
  misc_feature 1..36: note = Synthetic oligonucleotide
  source 1..36: mol_type = other DNA

SEQ ID NO: 29079 - DNA, 36 bp, synthetic construct; identical to SEQ ID NO: 14193
  misc_feature 1..36: note = Synthetic oligonucleotide
  source 1..36: mol_type = other DNA

SEQ ID NO: 29080 - DNA, 36 bp, synthetic construct; identical to SEQ ID NO: 14193
  misc_feature 1..36: note = Synthetic oligonucleotide
  source 1..36: mol_type = other DNA

SEQ ID NO: 29081 - DNA, 36 bp, synthetic construct; identical to SEQ ID NO: 14193
  misc_feature 1..36: note = Synthetic oligonucleotide
  source 1..36: mol_type = other DNA

SEQ ID NO: 29082 - DNA, 36 bp, synthetic construct
  misc_feature 1..36: note = Synthetic oligonucleotide
  source 1..36: mol_type = other DNA
gtttcagtatagcaaaaattgagagggtaccaaaat

SEQ ID NO: 29083 - DNA, 36 bp, synthetic construct
  misc_feature 1..36: note = Synthetic oligonucleotide
  source 1..36: mol_type = other DNA
gtttcagtatagcaaaaatttagagggtaccaaaac

SEQ ID NO: 29084 - DNA, 36 bp, synthetic construct; identical to SEQ ID NO: 29083
  misc_feature 1..36: note = Synthetic oligonucleotide
  source 1..36: mol_type = other DNA

SEQ ID NO: 29085 - DNA, 36 bp, synthetic construct
  misc_feature 1..36: note = Synthetic oligonucleotide
  source 1..36: mol_type = other DNA
gtttcagtatagcaagaattgagagggtaccaaaac

SEQ ID NO: 29086 - DNA, 37 bp, synthetic construct
  misc_feature 1..37: note = Synthetic oligonucleotide
  source 1..37: mol_type = other DNA
gtttcagtcaccctgaacatctcaaccttgttgagac

SEQ ID NO: 29087 - DNA, 37 bp, synthetic construct; identical to SEQ ID NO: 29086
  misc_feature 1..37: note = Synthetic oligonucleotide
  source 1..37: mol_type = other DNA

SEQ ID NO: 29088 - DNA, 37 bp, synthetic construct
  misc_feature 1..37: note = Synthetic oligonucleotide
  source 1..37: mol_type = other DNA
gtttcagtcaccctgaacgattcagtcccagtgggac

SEQ ID NO: 29089 - DNA, 37 bp, synthetic construct
  misc_feature 1..37: note = Synthetic oligonucleotide
  source 1..37: mol_type = other DNA
gtttcagtcaccctgaatatctcaacctcgttgagac

SEQ ID NO: 29090 - DNA, 37 bp, synthetic construct
  misc_feature 1..37: note = Synthetic oligonucleotide
  source 1..37: mol_type = other DNA
gtttcagttaccctgaacttttaaatcccattgggat

SEQ ID NO: 29091 - DNA, 37 bp, synthetic construct; identical to SEQ ID NO: 29090
  misc_feature 1..37: note = Synthetic oligonucleotide
  source 1..37: mol_type = other DNA

SEQ ID NO: 29092 - DNA, 36 bp, synthetic construct
  misc_feature 1..36: note = Synthetic oligonucleotide
  source 1..36: mol_type = other DNA
gtttcagttggcctccgattcccccctcgctattct

SEQ ID NO: 29093 - DNA, 36 bp, synthetic construct; identical to SEQ ID NO: 14224
  misc_feature 1..36: note = Synthetic oligonucleotide
  source 1..36: mol_type = other DNA

SEQ ID NO: 29094 - DNA, 37 bp, synthetic construct
  misc_feature 1..37: note = Synthetic oligonucleotide
  source 1..37: mol_type = other DNA
gtttccgagagtgtgcaattcctgatctgctactctc

SEQ ID NO: 29095 - DNA, 36 bp, synthetic construct
  misc_feature 1..36: note = Synthetic oligonucleotide
  source 1..36: mol_type = other DNA
gtttccgtccccttcccggggatcttatttctcaat

SEQ ID NO: 29096 - DNA, 36 bp, synthetic construct; identical to SEQ ID NO: 29095
  misc_feature 1..36: note = Synthetic oligonucleotide
  source 1..36: mol_type = other DNA

SEQ ID NO: 29097 - DNA, 36 bp, synthetic construct
  misc_feature 1..36: note = Synthetic oligonucleotide
  source 1..36: mol_type = other DNA
gtttccgtgctatctacttttacatcattctcaaac

SEQ ID NO: 29098 - DNA, 36 bp, synthetic construct
  misc_feature 1..36: note = Synthetic oligonucleotide
  source 1..36: mol_type = other DNA
gtttcgacttcacccccctgagaagtcggtcacgct

SEQ ID NO: 29099 - DNA, 36 bp, synthetic construct
  misc_feature 1..36: note = Synthetic oligonucleotide
  source 1..36: mol_type = other DNA
gtttcggaagtaccgcaaaccaagcactagttcacc

SEQ ID NO: 29100 - DNA, 36 bp, synthetic construct
  misc_feature 1..36: note = Synthetic oligonucleotide
  source 1..36: mol_type = other DNA
gtttcggaatcattcaattcaacacagctctaaaac

SEQ ID NO: 29101 - DNA, 19 bp, synthetic construct
  misc_feature 1..19: note = Synthetic oligonucleotide
  source 1..19: mol_type = other DNA
gtttcggaggtacggtaat

SEQ ID NO: 29102 - DNA, 22 bp, synthetic construct
  misc_feature 1..22: note = Synthetic oligonucleotide
  source 1..22: mol_type = other DNA
gtttcggaggtacggtaatcca

SEQ ID NO: 29103 - DNA, 22 bp, synthetic construct
  misc_feature 1..22: note = Synthetic oligonucleotide
  source 1..22: mol_type = other DNA
gtttcggaggtacggtaatcca

SEQ ID NO: 29104 - DNA, 36 bp, synthetic construct
  misc_feature 1..36: note = Synthetic oligonucleotide
  source 1..36: mol_type = other DNA
gtttcggtactctctcagttttcggtataggaaaac

SEQ ID NO: 29105 - DNA, 36 bp, synthetic construct
  misc_feature 1..36: note = Synthetic oligonucleotide
  source 1..36: mol_type = other DNA
gtttcggttctctgatggatattgataaatttgtac

SEQ ID NO: 29106 - DNA, 36 bp, synthetic construct; identical to SEQ ID NO: 29105
  misc_feature 1..36: note = Synthetic oligonucleotide
  source 1..36: mol_type = other DNA

SEQ ID NO: 29107 - DNA, 36 bp, synthetic construct
  misc_feature 1..36: note = Synthetic oligonucleotide
  source 1..36: mol_type = other DNA
gtttcggtttgaccgcatttccccatcggctaaact

SEQ ID NO: 29108 - DNA, 36 bp, synthetic construct
  misc_feature 1..36: note = Synthetic oligonucleotide
  source 1..36: mol_type = other DNA
gtttctctacattcttgatttacaaggttctcaaac

SEQ ID NO: 29109 - DNA, 36 bp, synthetic construct
  misc_feature 1..36: note = Synthetic oligonucleotide
  source 1..36: mol_type = other DNA
gtttgaaatccttccgtattaacaagactctcaaac

SEQ ID NO: 29110 - DNA, 36 bp, synthetic construct; identical to SEQ ID NO: 29109
  misc_feature 1..36: note = Synthetic oligonucleotide
  source 1..36: mol_type = other DNA

SEQ ID NO: 29111 - DNA, 36 bp, synthetic construct; identical to SEQ ID NO: 29109
  misc_feature 1..36: note = Synthetic oligonucleotide
  source 1..36: mol_type = other DNA

SEQ ID NO: 29112 - DNA, 36 bp, synthetic construct; identical to SEQ ID NO: 29109
  misc_feature 1..36: note = Synthetic oligonucleotide
  source 1..36: mol_type = other DNA

SEQ ID NO: 29113 - DNA, 36 bp, synthetic construct; identical to SEQ ID NO: 29109
  misc_feature 1..36: note = Synthetic oligonucleotide
  source 1..36: mol_type = other DNA

SEQ ID NO: 29114 - DNA, 36 bp, synthetic construct; identical to SEQ ID NO: 29109
  misc_feature 1..36: note = Synthetic oligonucleotide
  source 1..36: mol_type = other DNA

SEQ ID NO: 29115 - DNA, 36 bp, synthetic construct; identical to SEQ ID NO: 29109
  misc_feature 1..36: note = Synthetic oligonucleotide
  source 1..36: mol_type = other DNA

SEQ ID NO: 29116 - DNA, 36 bp, synthetic construct
  misc_feature 1..36: note = Synthetic oligonucleotide
  source 1..36: mol_type = other DNA
gtttgaaatccttctgtattaacaagactctcaaac

SEQ ID NO: 29117 - DNA, 36 bp, synthetic construct; identical to SEQ ID NO: 29116
  misc_feature 1..36: note = Synthetic oligonucleotide
  source 1..36: mol_type = other DNA

SEQ ID NO: 29118 - DNA, 36 bp, synthetic construct; identical to SEQ ID NO: 29116
  misc_feature 1..36: note = Synthetic oligonucleotide
  source 1..36: mol_type = other DNA

SEQ ID NO: 29119 - DNA, 36 bp, synthetic construct; identical to SEQ ID NO: 29116
  misc_feature 1..36: note = Synthetic oligonucleotide
  source 1..36: mol_type = other DNA

SEQ ID NO: 29120 - DNA, 36 bp, synthetic construct; identical to SEQ ID NO: 29116
  misc_feature 1..36: note = Synthetic oligonucleotide
  source 1..36: mol_type = other DNA

SEQ ID NO: 29121 - DNA, 36 bp, synthetic construct; identical to SEQ ID NO: 14237
  misc_feature 1..36: note = Synthetic oligonucleotide
  source 1..36: mol_type = other DNA

SEQ ID NO: 29122 - DNA, 36 bp, synthetic construct
  misc_feature 1..36: note = Synthetic oligonucleotide
  source 1..36: mol_type = other DNA
gtttgaataccatatatctttacatcattctcaaac

SEQ ID NO: 29123 - DNA, 36 bp, synthetic construct
  misc_feature 1..36: note = Synthetic oligonucleotide
  source 1..36: mol_type = other DNA
gtttgaatactatacgtttttacatcattctcaaac

SEQ ID NO: 29124 - DNA, 36 bp, synthetic construct; identical to SEQ ID NO: 29123
  misc_feature 1..36: note = Synthetic oligonucleotide
  source 1..36: mol_type = other DNA

SEQ ID NO: 29125 - DNA, 36 bp, synthetic construct; identical to SEQ ID NO: 14238
  misc_feature 1..36: note = Synthetic oligonucleotide
  source 1..36: mol_type = other DNA

SEQ ID NO: 29126 - DNA, 36 bp, synthetic construct
  misc_feature 1..36: note = Synthetic oligonucleotide
  source 1..36: mol_type = other DNA
gtttgaattccttccgtattaacaagactctcaaac

SEQ ID NO: 29127 - DNA, 36 bp, synthetic construct; identical to SEQ ID NO: 14242
  misc_feature 1..36: note = Synthetic oligonucleotide
  source 1..36: mol_type = other DNA

SEQ ID NO: 29128 - DNA, 36 bp, synthetic construct; identical to SEQ ID NO: 14242
  misc_feature 1..36: note = Synthetic oligonucleotide
  source 1..36: mol_type = other DNA

SEQ ID NO: 29129 - DNA, 36 bp, synthetic construct
  misc_feature 1..36: note = Synthetic oligonucleotide
  source 1..36: mol_type = other DNA
gtttgaccaccatatgaaattacaccattctcaaac

SEQ ID NO: 29130 - DNA, 36 bp, synthetic construct; identical to SEQ ID NO: 29129
  misc_feature 1..36: note = Synthetic oligonucleotide
  source 1..36: mol_type = other DNA

SEQ ID NO: 29131 - DNA, 36 bp, synthetic construct
  misc_feature 1..36: note = Synthetic oligonucleotide
  source 1..36: mol_type = other DNA
gtttgactaccagtcagaatgtcactgctccaaaac

SEQ ID NO: 29132 - DNA, 36 bp, synthetic construct; identical to SEQ ID NO: 14246
  misc_feature 1..36: note = Synthetic oligonucleotide
  source 1..36: mol_type = other DNA

SEQ ID NO: 29133 - DNA, 36 bp, synthetic construct; identical to SEQ ID NO: 14248
  misc_feature 1..36: note = Synthetic oligonucleotide
  source 1..36: mol_type = other DNA

SEQ ID NO: 29134 - DNA, 36 bp, synthetic construct; identical to SEQ ID NO: 14248
  misc_feature 1..36: note = Synthetic oligonucleotide
  source 1..36: mol_type = other DNA

SEQ ID NO: 29135 - DNA, 36 bp, synthetic construct; identical to SEQ ID NO: 14250
  misc_feature 1..36: note = Synthetic oligonucleotide
  source 1..36: mol_type = other DNA

SEQ ID NO: 29136 - DNA, 36 bp, synthetic construct; identical to SEQ ID NO: 14250
  misc_feature 1..36: note = Synthetic oligonucleotide
  source 1..36: mol_type = other DNA

SEQ ID NO: 29137 - DNA, 36 bp, synthetic construct; identical to SEQ ID NO: 14250
  misc_feature 1..36: note = Synthetic oligonucleotide
  source 1..36: mol_type = other DNA

SEQ ID NO: 29138 - DNA, 36 bp, synthetic construct
  misc_feature 1..36: note = Synthetic oligonucleotide
  source 1..36: mol_type = other DNA
gtttgactaccatctaaaacaacacagctctcaaac

SEQ ID NO: 29139 - DNA, 36 bp, synthetic construct
  misc_feature 1..36: note = Synthetic oligonucleotide
  source 1..36: mol_type = other DNA
gtttgactaccatctaaaacaacacgactctcaaac

SEQ ID NO: 29140 - DNA, 36 bp, synthetic construct
  misc_feature 1..36: note = Synthetic oligonucleotide
  source 1..36: mol_type = other DNA
gtttgactaccatctaaaataacacgaacctcaaac

SEQ ID NO: 29141 - DNA, 36 bp, synthetic construct; identical to SEQ ID NO: 14251
  misc_feature 1..36: note = Synthetic oligonucleotide
  source 1..36: mol_type = other DNA

SEQ ID NO: 29142 - DNA, 36 bp, synthetic construct; identical to SEQ ID NO: 14251
  misc_feature 1..36: note = Synthetic oligonucleotide
  source 1..36: mol_type = other DNA

SEQ ID NO: 29143 - DNA, 36 bp, synthetic construct; identical to SEQ ID NO: 14252
  misc_feature 1..36: note = Synthetic oligonucleotide
  source 1..36: mol_type = other DNA

SEQ ID NO: 29144 - DNA, 36 bp, synthetic construct
  misc_feature 1..36: note = Synthetic oligonucleotide
  source 1..36: mol_type = other DNA
gtttgactaccatctaggataacactactctcaaac

SEQ ID NO: 29145 - DNA, 36 bp, synthetic construct; identical to SEQ ID NO: 14254
  misc_feature 1..36: note = Synthetic oligonucleotide
  source 1..36: mol_type = other DNA

SEQ ID NO: 29146 - DNA, 36 bp, synthetic construct
  misc_feature 1..36: note = Synthetic oligonucleotide
  source 1..36: mol_type = other DNA
gtttgactaccatttagaattacactactctcaaac

SEQ ID NO: 29147 - DNA, 36 bp, synthetic construct; identical to SEQ ID NO: 29146
  misc_feature 1..36: note = Synthetic oligonucleotide
  source 1..36: mol_type = other DNA

SEQ ID NO: 29148 - DNA, 36 bp, synthetic construct; identical to SEQ ID NO: 29146
  misc_feature 1..36: note = Synthetic oligonucleotide
  source 1..36: mol_type = other DNA

SEQ ID NO: 29149 - DNA, 36 bp, synthetic construct; identical to SEQ ID NO: 14257
  misc_feature 1..36: note = Synthetic oligonucleotide
  source 1..36: mol_type = other DNA

SEQ ID NO: 29150 - DNA, 36 bp, synthetic construct; identical to SEQ ID NO: 14257
  misc_feature 1..36: note = Synthetic oligonucleotide
  source 1..36: mol_type = other DNA

SEQ ID NO: 29151 - DNA, 36 bp, synthetic construct; identical to SEQ ID NO: 14257
  misc_feature 1..36: note = Synthetic oligonucleotide
  source 1..36: mol_type = other DNA

SEQ ID NO: 29152 - DNA, 36 bp, synthetic construct; identical to SEQ ID NO: 14257
  misc_feature 1..36: note = Synthetic oligonucleotide
  source 1..36: mol_type = other DNA

SEQ ID NO: 29153 - DNA, 36 bp, synthetic construct; identical to SEQ ID NO: 14257
  misc_feature 1..36: note = Synthetic oligonucleotide
  source 1..36: mol_type = other DNA

SEQ ID NO: 29154 - DNA, 36 bp, synthetic construct; identical to SEQ ID NO: 14257
  misc_feature 1..36: note = Synthetic oligonucleotide
  source 1..36: mol_type = other DNA

SEQ ID NO: 29155 - DNA, 36 bp, synthetic construct; identical to SEQ ID NO: 14257
  misc_feature 1..36: note = Synthetic oligonucleotide
  source 1..36: mol_type = other DNA

SEQ ID NO: 29156 - DNA, 36 bp, synthetic construct; identical to SEQ ID NO: 14257
  misc_feature 1..36: note = Synthetic oligonucleotide
  source 1..36: mol_type = other DNA

SEQ ID NO: 29157 - DNA, 36 bp, synthetic construct; identical to SEQ ID NO: 14257
  misc_feature 1..36: note = Synthetic oligonucleotide
  source 1..36: mol_type = other DNA

SEQ ID NO: 29158 - DNA, 36 bp, synthetic construct; identical to SEQ ID NO: 14257
  misc_feature 1..36: note = Synthetic oligonucleotide
  source 1..36: mol_type = other DNA

SEQ ID NO: 29159 - DNA, 36 bp, synthetic construct; identical to SEQ ID NO: 14257
  misc_feature 1..36: note = Synthetic oligonucleotide
  source 1..36: mol_type = other DNA

SEQ ID NO: 29160 - DNA, 36 bp, synthetic construct; identical to SEQ ID NO: 14257
  misc_feature 1..36: note = Synthetic oligonucleotide
  source 1..36: mol_type = other DNA

SEQ ID NO: 29161 - DNA, 36 bp, synthetic construct; identical to SEQ ID NO: 14257
  misc_feature 1..36: note = Synthetic oligonucleotide
  source 1..36: mol_type = other DNA

SEQ ID NO: 29162 - DNA, 36 bp, synthetic construct
  misc_feature 1..36: note = Synthetic oligonucleotide
  source 1..36: mol_type = other DNA
gtttgactaccctttaggattacaccatactcaaac

SEQ ID NO: 29163 - DNA, 36 bp, synthetic construct
  misc_feature 1..36: note = Synthetic oligonucleotide
  source 1..36: mol_type = other DNA
gtttgactatcatatgaatttacactactctcaaac

SEQ ID NO: 29164 - DNA, 36 bp, synthetic construct; identical to SEQ ID NO: 29163
  misc_feature 1..36: note = Synthetic oligonucleotide
  source 1..36: mol_type = other DNA

SEQ ID NO: 29165 - DNA, 36 bp, synthetic construct; identical to SEQ ID NO: 29163
  misc_feature 1..36: note = Synthetic oligonucleotide
  source 1..36: mol_type = other DNA

SEQ ID NO: 29166 - DNA, 36 bp, synthetic construct; identical to SEQ ID NO: 29163
  misc_feature 1..36: note = Synthetic oligonucleotide
  source 1..36: mol_type = other DNA

SEQ ID NO: 29167 - DNA, 36 bp, synthetic construct; identical to SEQ ID NO: 29163
  misc_feature 1..36: note = Synthetic oligonucleotide
  source 1..36: mol_type = other DNA

SEQ ID NO: 29168 - DNA, 36 bp, synthetic construct; identical to SEQ ID NO: 29163
  misc_feature 1..36: note = Synthetic oligonucleotide
  source 1..36: mol_type = other DNA

SEQ ID NO: 29169 - DNA, 36 bp, synthetic construct
  misc_feature 1..36: note = Synthetic oligonucleotide
  source 1..36: mol_type = other DNA
gtttgagaaatatgtaattttgtatgaatctaaaac

SEQ ID NO: 29170 - DNA, 36 bp, synthetic construct; identical to SEQ ID NO: 29169
  misc_feature 1..36: note = Synthetic oligonucleotide
  source 1..36: mol_type = other DNA

SEQ ID NO: 29171 - DNA, 36 bp, synthetic construct; identical to SEQ ID NO: 14259
  misc_feature 1..36: note = Synthetic oligonucleotide
  source 1..36: mol_type = other DNA

SEQ ID NO: 29172 - DNA, 36 bp, synthetic construct; identical to SEQ ID NO: 14259
  misc_feature 1..36: note = Synthetic oligonucleotide
  source 1..36: mol_type = other DNA

SEQ ID NO: 29173 - DNA, 36 bp, synthetic construct; identical to SEQ ID NO: 14259
  misc_feature 1..36: note = Synthetic oligonucleotide
  source 1..36: mol_type = other DNA

SEQ ID NO: 29174 - DNA, 38 bp, synthetic construct
  misc_feature 1..38: note = Synthetic oligonucleotide
  source 1..38: mol_type = other DNA
gtttgagaaccatgtaagtttgtaaggatctaaaacag

SEQ ID NO: 29175 - DNA, 38 bp, synthetic construct; identical to SEQ ID NO: 29174
  misc_feature 1..38: note = Synthetic oligonucleotide
  source 1..38: mol_type = other DNA

SEQ ID NO: 29176 - DNA, 36 bp, synthetic construct; identical to SEQ ID NO: 14261
  misc_feature 1..36: note = Synthetic oligonucleotide
  source 1..36: mol_type = other DNA

SEQ ID NO: 29177 - DNA, 36 bp, synthetic construct; identical to SEQ ID NO: 14263
  misc_feature 1..36: note = Synthetic oligonucleotide
  source 1..36: mol_type = other DNA

SEQ ID NO: 29178 - DNA, 36 bp, synthetic construct; identical to SEQ ID NO: 14263
  misc_feature 1..36: note = Synthetic oligonucleotide
  source 1..36: mol_type = other DNA

SEQ ID NO: 29179 - DNA, 36 bp, synthetic construct; identical to SEQ ID NO: 14263
  misc_feature 1..36: note = Synthetic oligonucleotide
  source 1..36: mol_type = other DNA

SEQ ID NO: 29180 - DNA, 36 bp, synthetic construct; identical to SEQ ID NO: 14263
  misc_feature 1..36: note = Synthetic oligonucleotide
  source 1..36: mol_type = other DNA

SEQ ID NO: 29181 - DNA, 36 bp, synthetic construct; identical to SEQ ID NO: 14263
  misc_feature 1..36: note = Synthetic oligonucleotide
  source 1..36: mol_type = other DNA

SEQ ID NO: 29182 - DNA, 36 bp, synthetic construct; identical to SEQ ID NO: 14265
  misc_feature 1..36: note = Synthetic oligonucleotide
  source 1..36: mol_type = other DNA

SEQ ID NO: 29183 - DNA, 36 bp, synthetic construct; identical to SEQ ID NO: 14265
  misc_feature 1..36: note = Synthetic oligonucleotide
  source 1..36: mol_type = other DNA

SEQ ID NO: 29184 - DNA, 36 bp, synthetic construct; identical to SEQ ID NO: 14265
  misc_feature 1..36: note = Synthetic oligonucleotide
  source 1..36: mol_type = other DNA

SEQ ID NO: 29185 - DNA, 36 bp, synthetic construct; identical to SEQ ID NO: 14265
  misc_feature 1..36: note = Synthetic oligonucleotide
  source 1..36: mol_type = other DNA

SEQ ID NO: 29186 - DNA, 36 bp, synthetic construct
  misc_feature 1..36: note = Synthetic oligonucleotide
  source 1..36: mol_type = other DNA
gtttgagaaccttgtaaattagaataagtcttaaac

SEQ ID NO: 29187 - DNA, 36 bp, synthetic construct
  misc_feature 1..36: note = Synthetic oligonucleotide
  source 1..36: mol_type = other DNA
gtttgagaaccttgtaagttaagaagagtgtaaaac

SEQ ID NO: 29188 - DNA, 23 bp, synthetic construct
  misc_feature 1..23: note = Synthetic oligonucleotide
  source 1..23: mol_type = other DNA
gtttgagaaccttgtaagttatg

SEQ ID NO: 29189 - DNA, 36 bp, synthetic construct
  misc_feature 1..36: note = Synthetic oligonucleotide
  source 1..36: mol_type = other DNA
gtttgagaaccttgtaagttcagaaggaaacaaaac

SEQ ID NO: 29190 - DNA, 36 bp, synthetic construct
  misc_feature 1..36: note = Synthetic oligonucleotide
  source 1..36: mol_type = other DNA
gtttgagaaccttgtaagtttgaataggtctaaaac

SEQ ID NO: 29191 - DNA, 36 bp, synthetic construct; identical to SEQ ID NO: 14271
  misc_feature 1..36: note = Synthetic oligonucleotide
  source 1..36: mol_type = other DNA

SEQ ID NO: 29192 - DNA, 36 bp, synthetic construct
  misc_feature 1..36: note = Synthetic oligonucleotide
  source 1..36: mol_type = other DNA
gtttgagaaccttgtaagtttgtaatggtgcaaaac

SEQ ID NO: 29193 - DNA, 36 bp, synthetic construct; identical to SEQ ID NO: 14272
  misc_feature 1..36: note = Synthetic oligonucleotide
  source 1..36: mol_type = other DNA

SEQ ID NO: 29194 - DNA, 36 bp, synthetic construct; identical to SEQ ID NO: 14272
  misc_feature 1..36: note = Synthetic oligonucleotide
  source 1..36: mol_type = other DNA

SEQ ID NO: 29195 - DNA, 36 bp, synthetic construct; identical to SEQ ID NO: 14272
  misc_feature 1..36: note = Synthetic oligonucleotide
  source 1..36: mol_type = other DNA

SEQ ID NO: 29196 - DNA, 36 bp, synthetic construct; identical to SEQ ID NO: 14272
  misc_feature 1..36: note = Synthetic oligonucleotide
  source 1..36: mol_type = other DNA

SEQ ID NO: 29197 - DNA, 36 bp, synthetic construct; identical to SEQ ID NO: 14272
  misc_feature 1..36: note = Synthetic oligonucleotide
  source 1..36: mol_type = other DNA

SEQ ID NO: 29198 - DNA, 36 bp, synthetic construct; identical to SEQ ID NO: 14272
  misc_feature 1..36: note = Synthetic oligonucleotide
  source 1..36: mol_type = other DNA

SEQ ID NO: 29199 - DNA, 36 bp, synthetic construct
  misc_feature 1..36: note = Synthetic oligonucleotide
  source 1..36: mol_type = other DNA
gtttgagaaccttgtaatttcagataagtgtaaaac

SEQ ID NO: 29200 - DNA, 36 bp, synthetic construct
  misc_feature 1..36: note = Synthetic oligonucleotide
  source 1..36: mol_type = other DNA
gtttgagaactatgtaaattatgctggtagcaaaac

SEQ ID NO: 29201 - DNA, 36 bp, synthetic construct; identical to SEQ ID NO: 29200
  misc_feature 1..36: note = Synthetic oligonucleotide
  source 1..36: mol_type = other DNA

SEQ ID NO: 29202 - DNA, 36 bp, synthetic construct; identical to SEQ ID NO: 29200
  misc_feature 1..36: note = Synthetic oligonucleotide
  source 1..36: mol_type = other DNA

SEQ ID NO: 29203 - DNA, 36 bp, synthetic construct
  misc_feature 1..36: note = Synthetic oligonucleotide
  source 1..36: mol_type = other DNA
gtttgagaactatgtaaattatgctggtagtaaaac

SEQ ID NO: 29204 - DNA, 36 bp, synthetic construct
  misc_feature 1..36: note = Synthetic oligonucleotide
  source 1..36: mol_type = other DNA
gtttgagaactatgtaatttttgttggtactaaagc

SEQ ID NO: 29205 - DNA, 36 bp, synthetic construct; identical to SEQ ID NO: 29204
  misc_feature 1..36: note = Synthetic oligonucleotide
  source 1..36: mol_type = other DNA

SEQ ID NO: 29206 - DNA, 28 bp, synthetic construct
  misc_feature 1..28: note = Synthetic oligonucleotide
  source 1..28: mol_type = other DNA
gtttgagaagtatgtattttaatatgga

SEQ ID NO: 29207 - DNA, 37 bp, synthetic construct
  misc_feature 1..37: note = Synthetic oligonucleotide
  source 1..37: mol_type = other DNA
gtttgagaagtatgtattttaatatggatacaaaaca

SEQ ID NO: 29208 - DNA, 36 bp, synthetic construct
  misc_feature 1..36: note = Synthetic oligonucleotide
  source 1..36: mol_type = other DNA
gtttgagaatagcgtaaatctataaggtagtaaaac

SEQ ID NO: 29209 - DNA, 36 bp, synthetic construct
  misc_feature 1..36: note = Synthetic oligonucleotide
  source 1..36: mol_type = other DNA
gtttgagaatagtgtaaatccataaggtagtaaaac

SEQ ID NO: 29210 - DNA, 36 bp, synthetic construct; identical to SEQ ID NO: 29209
  misc_feature 1..36: note = Synthetic oligonucleotide
  source 1..36: mol_type = other DNA

SEQ ID NO: 29211 - DNA, 36 bp, synthetic construct; identical to SEQ ID NO: 14276
  misc_feature 1..36: note = Synthetic oligonucleotide
  source 1..36: mol_type = other DNA

SEQ ID NO: 29212 - DNA, 36 bp, synthetic construct; identical to SEQ ID NO: 14276
  misc_feature 1..36: note = Synthetic oligonucleotide
  source 1..36: mol_type = other DNA

SEQ ID NO: 29213 - DNA, 36 bp, synthetic construct; identical to SEQ ID NO: 14276
  misc_feature 1..36: note = Synthetic oligonucleotide
  source 1..36: mol_type = other DNA

SEQ ID NO: 29214 - DNA, 36 bp, synthetic construct; identical to SEQ ID NO: 14276
  misc_feature 1..36: note = Synthetic oligonucleotide
  source 1..36: mol_type = other DNA

SEQ ID NO: 29215 - DNA, 36 bp, synthetic construct; identical to SEQ ID NO: 14276
  misc_feature 1..36: note = Synthetic oligonucleotide
  source 1..36: mol_type = other DNA

SEQ ID NO: 29216 - DNA, 36 bp, synthetic construct; identical to SEQ ID NO: 14276
  misc_feature 1..36: note = Synthetic oligonucleotide
  source 1..36: mol_type = other DNA

SEQ ID NO: 29217 - DNA, 36 bp, synthetic construct; identical to SEQ ID NO: 14276
  misc_feature 1..36: note = Synthetic oligonucleotide
  source 1..36: mol_type = other DNA

SEQ ID NO: 29218 - DNA, 37 bp, synthetic construct
  misc_feature 1..37: note = Synthetic oligonucleotide
  source 1..37: mol_type = other DNA
gtttgagaatagtgtaaatccataaggtagtgaaact

SEQ ID NO: 29219 - DNA, 35 bp, synthetic construct
  misc_feature 1..35: note = Synthetic oligonucleotide
  source 1..35: mol_type = other DNA
gtttgagaatagtgtaaatctataaggtagtaaaa

SEQ ID NO: 29220 - DNA, 36 bp, synthetic construct; identical to SEQ ID NO: 14277
  misc_feature 1..36: note = Synthetic oligonucleotide
  source 1..36: mol_type = other DNA

SEQ ID NO: 29221 - DNA, 36 bp, synthetic construct; identical to SEQ ID NO: 14277
  misc_feature 1..36: note = Synthetic oligonucleotide
  source 1..36: mol_type = other DNA

SEQ ID NO: 29222 - DNA, 36 bp, synthetic construct; identical to SEQ ID NO: 14277
  misc_feature 1..36: note = Synthetic oligonucleotide
  source 1..36: mol_type = other DNA

SEQ ID NO: 29223 - DNA, 36 bp, synthetic construct; identical to SEQ ID NO: 14277
  misc_feature 1..36: note = Synthetic oligonucleotide
  source 1..36: mol_type = other DNA

SEQ ID NO: 29224 - DNA, 36 bp, synthetic construct; identical to SEQ ID NO: 14277
  misc_feature 1..36: note = Synthetic oligonucleotide
  source 1..36: mol_type = other DNA

SEQ ID NO: 29225 - DNA, 36 bp, synthetic construct; identical to SEQ ID NO: 14277
  misc_feature 1..36: note = Synthetic oligonucleotide
  source 1..36: mol_type = other DNA

SEQ ID NO: 29226 - DNA, 36 bp, synthetic construct; identical to SEQ ID NO: 14277
  misc_feature 1..36: note = Synthetic oligonucleotide
  source 1..36: mol_type = other DNA

SEQ ID NO: 29227 - DNA, 36 bp, synthetic construct; identical to SEQ ID NO: 14277
  misc_feature 1..36: note = Synthetic oligonucleotide
  source 1..36: mol_type = other DNA

SEQ ID NO: 29228 - DNA, 36 bp, synthetic construct; identical to SEQ ID NO: 14277
  misc_feature 1..36: note = Synthetic oligonucleotide
  source 1..36: mol_type = other DNA

SEQ ID NO: 29229 - DNA, 36 bp, synthetic construct; identical to SEQ ID NO: 14277
  misc_feature 1..36: note = Synthetic oligonucleotide
  source 1..36: mol_type = other DNA

SEQ ID NO: 29230 - DNA, 36 bp, synthetic construct; identical to SEQ ID NO: 14277
  misc_feature 1..36: note = Synthetic oligonucleotide
  source 1..36: mol_type = other DNA

SEQ ID NO: 29231 - DNA, 36 bp, synthetic construct; identical to SEQ ID NO: 14277
  misc_feature 1..36: note = Synthetic oligonucleotide
  source 1..36: mol_type = other DNA

SEQ ID NO: 29232 - DNA, 36 bp, synthetic construct; identical to SEQ ID NO: 14277
  misc_feature 1..36: note = Synthetic oligonucleotide
  source 1..36: mol_type = other DNA

SEQ ID NO: 29233 - DNA, 36 bp, synthetic construct; identical to SEQ ID NO: 14277
  misc_feature 1..36: note = Synthetic oligonucleotide
  source 1..36: mol_type = other DNA

SEQ ID NO: 29234 - DNA, 36 bp, synthetic construct; identical to SEQ ID NO: 14277
  misc_feature 1..36: note = Synthetic oligonucleotide
  source 1..36: mol_type = other DNA

SEQ ID NO: 29235 - DNA, 36 bp, synthetic construct; identical to SEQ ID NO: 14277
  misc_feature 1..36: note = Synthetic oligonucleotide
  source 1..36: mol_type = other DNA

SEQ ID NO: 29236 - DNA, 36 bp, synthetic construct; identical to SEQ ID NO: 14277
  misc_feature 1..36: note = Synthetic oligonucleotide
  source 1..36: mol_type = other DNA

SEQ ID NO: 29237 - DNA, 36 bp, synthetic construct; identical to SEQ ID NO: 14277
  misc_feature 1..36: note = Synthetic oligonucleotide
  source 1..36: mol_type = other DNA

SEQ ID NO: 29238 - DNA, 36 bp, synthetic construct; identical to SEQ ID NO: 14277
  misc_feature 1..36: note = Synthetic oligonucleotide
  source 1..36: mol_type = other DNA

SEQ ID NO: 29239 - DNA, 36 bp, synthetic construct; identical to SEQ ID NO: 14277
  misc_feature 1..36: note = Synthetic oligonucleotide
  source 1..36: mol_type = other DNA

SEQ ID NO: 29240 - DNA, 36 bp, synthetic construct; identical to SEQ ID NO: 14277
  misc_feature 1..36: note = Synthetic oligonucleotide
  source 1..36: mol_type = other DNA

SEQ ID NO: 29241 - DNA, 36 bp, synthetic construct; identical to SEQ ID NO: 14277
  misc_feature 1..36: note = Synthetic oligonucleotide
  source 1..36: mol_type = other DNA

SEQ ID NO: 29242 - DNA, 36 bp, synthetic construct; identical to SEQ ID NO: 14277
  misc_feature 1..36: note = Synthetic oligonucleotide
  source 1..36: mol_type = other DNA

SEQ ID NO: 29243 - DNA, 36 bp, synthetic construct; identical to SEQ ID NO: 14277
  misc_feature 1..36: note = Synthetic oligonucleotide
  source 1..36: mol_type = other DNA

SEQ ID NO: 29244 - DNA, 36 bp, synthetic construct; identical to SEQ ID NO: 14277
  misc_feature 1..36: note = Synthetic oligonucleotide
  source 1..36: mol_type = other DNA

SEQ ID NO: 29245 - DNA, 36 bp, synthetic construct; identical to SEQ ID NO: 14277
  misc_feature 1..36: note = Synthetic oligonucleotide
  source 1..36: mol_type = other DNA

SEQ ID NO: 29246 - DNA, 36 bp, synthetic construct; identical to SEQ ID NO: 14277
  misc_feature 1..36: note = Synthetic oligonucleotide
  source 1..36: mol_type = other DNA

SEQ ID NO: 29247 - DNA, 36 bp, synthetic construct; identical to SEQ ID NO: 14277
  misc_feature 1..36: note = Synthetic oligonucleotide
  source 1..36: mol_type = other DNA

SEQ ID NO: 29248 - DNA, 36 bp, synthetic construct; identical to SEQ ID NO: 14277
  misc_feature 1..36: note = Synthetic oligonucleotide
  source 1..36: mol_type = other DNA

SEQ ID NO: 29249 - DNA, 36 bp, synthetic construct; identical to SEQ ID NO: 14277
  misc_feature 1..36: note = Synthetic oligonucleotide
  source 1..36: mol_type = other DNA

SEQ ID NO: 29250 - DNA, 36 bp, synthetic construct; identical to SEQ ID NO: 14277
  misc_feature 1..36: note = Synthetic oligonucleotide
  source 1..36: mol_type = other DNA

SEQ ID NO: 29251 - DNA, 36 bp, synthetic construct; identical to SEQ ID NO: 14277
  misc_feature 1..36: note = Synthetic oligonucleotide
  source 1..36: mol_type = other DNA

SEQ ID NO: 29252 - DNA, 36 bp, synthetic construct; identical to SEQ ID NO: 14277
  misc_feature 1..36: note = Synthetic oligonucleotide
  source 1..36: mol_type = other DNA

SEQ ID NO: 29253 - DNA, 36 bp, synthetic construct; identical to SEQ ID NO: 14277
  misc_feature 1..36: note = Synthetic oligonucleotide
  source 1..36: mol_type = other DNA

SEQ ID NO: 29254 - DNA, 36 bp, synthetic construct; identical to SEQ ID NO: 14277
  misc_feature 1..36: note = Synthetic oligonucleotide
  source 1..36: mol_type = other DNA

SEQ ID NO: 29255 - DNA, 36 bp, synthetic construct; identical to SEQ ID NO: 14277
  misc_feature 1..36: note = Synthetic oligonucleotide
  source 1..36: mol_type = other DNA

SEQ ID NO: 29256 - DNA, 36 bp, synthetic construct; identical to SEQ ID NO: 14277
  misc_feature 1..36: note = Synthetic oligonucleotide
  source 1..36: mol_type = other DNA

SEQ ID NO: 29257 - DNA, 36 bp, synthetic construct; identical to SEQ ID NO: 14277
  misc_feature 1..36: note = Synthetic oligonucleotide
  source 1..36: mol_type = other DNA

SEQ ID NO: 29258 - DNA, 36 bp, synthetic construct; identical to SEQ ID NO: 14277
  misc_feature 1..36: note = Synthetic oligonucleotide
  source 1..36: mol_type = other DNA

SEQ ID NO: 29259 - DNA, 36 bp, synthetic construct; identical to SEQ ID NO: 14277
  misc_feature 1..36: note = Synthetic oligonucleotide
  source 1..36: mol_type = other DNA

SEQ ID NO: 29260 - DNA, 36 bp, synthetic construct; identical to SEQ ID NO: 14277
  misc_feature 1..36: note = Synthetic oligonucleotide
  source 1..36: mol_type = other DNA

SEQ ID NO: 29261 - DNA, 36 bp, synthetic construct; identical to SEQ ID NO: 14277
  misc_feature 1..36: note = Synthetic oligonucleotide
  source 1..36: mol_type = other DNA

SEQ ID NO: 29262 - DNA, 36 bp, synthetic construct; identical to SEQ ID NO: 14277
  misc_feature 1..36: note = Synthetic oligonucleotide
  source 1..36: mol_type = other DNA

SEQ ID NO: 29263 - DNA, 36 bp, synthetic construct; identical to SEQ ID NO: 14277
  misc_feature 1..36: note = Synthetic oligonucleotide
  source 1..36: mol_type = other DNA

SEQ ID NO: 29264 - DNA, 36 bp, synthetic construct; identical to SEQ ID NO: 14277
  misc_feature 1..36: note = Synthetic oligonucleotide
  source 1..36: mol_type = other DNA

SEQ ID NO: 29265 - DNA, 36 bp, synthetic construct; identical to SEQ ID NO: 14277
  misc_feature 1..36: note = Synthetic oligonucleotide
  source 1..36: mol_type = other DNA

SEQ ID NO: 29266 - DNA, 36 bp, synthetic construct; identical to SEQ ID NO: 14277
  misc_feature 1..36: note = Synthetic oligonucleotide
  source 1..36: mol_type = other DNA

SEQ ID NO: 29267 - DNA, 36 bp, synthetic construct; identical to SEQ ID NO: 14277
  misc_feature 1..36: note = Synthetic oligonucleotide
  source 1..36: mol_type = other DNA

SEQ ID NO: 29268 - DNA, 36 bp, synthetic construct; identical to SEQ ID NO: 14277
  misc_feature 1..36: note = Synthetic oligonucleotide
  source 1..36: mol_type = other DNA

SEQ ID NO: 29269 - DNA, 36 bp, synthetic construct; identical to SEQ ID NO: 14277
  misc_feature 1..36: note = Synthetic oligonucleotide
  source 1..36: mol_type = other DNA

SEQ ID NO: 29270 - DNA, 36 bp, synthetic construct; identical to SEQ ID NO: 14277
  misc_feature 1..36: note = Synthetic oligonucleotide
  source 1..36: mol_type = other DNA

SEQ ID NO: 29271 - DNA, 36 bp, synthetic construct; identical to SEQ ID NO: 14277
  misc_feature 1..36: note = Synthetic oligonucleotide
  source 1..36: mol_type = other DNA

SEQ ID NO: 29272 - DNA, 36 bp, synthetic construct; identical to SEQ ID NO: 14277
  misc_feature 1..36: note = Synthetic oligonucleotide
  source 1..36: mol_type = other DNA

SEQ ID NO: 29273 - DNA, 36 bp, synthetic construct; identical to SEQ ID NO: 14277
  misc_feature 1..36: note = Synthetic oligonucleotide
  source 1..36: mol_type = other DNA

SEQ ID NO: 29274 - DNA, 36 bp, synthetic construct; identical to SEQ ID NO: 14277
  misc_feature 1..36: note = Synthetic oligonucleotide
  source 1..36: mol_type = other DNA

SEQ ID NO: 29275 - DNA, 36 bp, synthetic construct; identical to SEQ ID NO: 14277
  misc_feature 1..36: note = Synthetic oligonucleotide
  source 1..36: mol_type = other DNA

SEQ ID NO: 29276 - DNA, 37 bp, synthetic construct
  misc_feature 1..37: note = Synthetic oligonucleotide
  source 1..37: mol_type = other DNA
gtttgagaatagtgtaaatctataaggtagtaaaact

SEQ ID NO: 29277 - DNA, 36 bp, synthetic construct
  misc_feature 1..36: note = Synthetic oligonucleotide
  source 1..36: mol_type = other DNA
gtttgagaatagtgtaaatctataaggtagtaaagc

SEQ ID NO: 29278 - DNA, 36 bp, synthetic construct; identical to SEQ ID NO: 14278
  misc_feature 1..36: note = Synthetic oligonucleotide
  source 1..36: mol_type = other DNA

SEQ ID NO: 29279 - DNA, 36 bp, synthetic construct; identical to SEQ ID NO: 14280
  misc_feature 1..36: note = Synthetic oligonucleotide
  source 1..36: mol_type = other DNA

SEQ ID NO: 29280 - DNA, 36 bp, synthetic construct; identical to SEQ ID NO: 14280
  misc_feature 1..36: note = Synthetic oligonucleotide
  source 1..36: mol_type = other DNA

SEQ ID NO: 29281 - DNA, 35 bp, synthetic construct
  misc_feature 1..35: note = Synthetic oligonucleotide
  source 1..35: mol_type = other DNA
gtttgagaatagtgtaaattcataaggtagtgaaa

SEQ ID NO: 29282 - DNA, 36 bp, synthetic construct
  misc_feature 1..36: note = Synthetic oligonucleotide
  source 1..36: mol_type = other DNA
gtttgagaatagtgtaaattcataaggtagtgaaac

SEQ ID NO: 29283 - DNA, 36 bp, synthetic construct
  misc_feature 1..36: note = Synthetic oligonucleotide
  source 1..36: mol_type = other DNA
gtttgagaatagtgtaaatttataaggtagtaaaac

SEQ ID NO: 29284 - DNA, 36 bp, synthetic construct; identical to SEQ ID NO: 14281
  misc_feature 1..36: note = Synthetic oligonucleotide
  source 1..36: mol_type = other DNA

SEQ ID NO: 29285 - DNA, 36 bp, synthetic construct; identical to SEQ ID NO: 14281
  misc_feature 1..36: note = Synthetic oligonucleotide
  source 1..36: mol_type = other DNA

SEQ ID NO: 29286 - DNA, 36 bp, synthetic construct; identical to SEQ ID NO: 14281
  misc_feature 1..36: note = Synthetic oligonucleotide
  source 1..36: mol_type = other DNA

SEQ ID NO: 29287 - DNA, 36 bp, synthetic construct; identical to SEQ ID NO: 14281
  misc_feature 1..36: note = Synthetic oligonucleotide
  source 1..36: mol_type = other DNA

SEQ ID NO: 29288 - DNA, 36 bp, synthetic construct; identical to SEQ ID NO: 14281
  misc_feature 1..36: note = Synthetic oligonucleotide
  source 1..36: mol_type = other DNA

SEQ ID NO: 29289 - DNA, 36 bp, synthetic construct; identical to SEQ ID NO: 14281
  misc_feature 1..36: note = Synthetic oligonucleotide
  source 1..36: mol_type = other DNA

SEQ ID NO: 29290 - DNA, 36 bp, synthetic construct; identical to SEQ ID NO: 14281
  misc_feature 1..36: note = Synthetic oligonucleotide
  source 1..36: mol_type = other DNA

SEQ ID NO: 29291 - DNA, 36 bp, synthetic construct; identical to SEQ ID NO: 14281
  misc_feature 1..36: note = Synthetic oligonucleotide
  source 1..36: mol_type = other DNA

SEQ ID NO: 29292 - DNA, 36 bp, synthetic construct; identical to SEQ ID NO: 14281
  misc_feature 1..36: note = Synthetic oligonucleotide
  source 1..36: mol_type = other DNA

SEQ ID NO: 29293 - DNA, 36 bp, synthetic construct; identical to SEQ ID NO: 14281
  misc_feature 1..36: note = Synthetic oligonucleotide
  source 1..36: mol_type = other DNA

SEQ ID NO: 29294 - DNA, 36 bp, synthetic construct; identical to SEQ ID NO: 14281
  misc_feature 1..36: note = Synthetic oligonucleotide
  source 1..36: mol_type = other DNA

SEQ ID NO: 29295 - DNA, 36 bp, synthetic construct; identical to SEQ ID NO: 14281
  misc_feature 1..36: note = Synthetic oligonucleotide
  source 1..36: mol_type = other DNA

SEQ ID NO: 29296 - DNA, 36 bp, synthetic construct; identical to SEQ ID NO: 14281
  misc_feature 1..36: note = Synthetic oligonucleotide
  source 1..36: mol_type = other DNA

SEQ ID NO: 29297 - DNA, 36 bp, synthetic construct; identical to SEQ ID NO: 14281
  misc_feature 1..36: note = Synthetic oligonucleotide
  source 1..36: mol_type = other DNA

SEQ ID NO: 29298 - DNA, 36 bp, synthetic construct; identical to SEQ ID NO: 14281
  misc_feature 1..36: note = Synthetic oligonucleotide
  source 1..36: mol_type = other DNA

SEQ ID NO: 29299 - DNA, 37 bp, synthetic construct
  misc_feature 1..37: note = Synthetic oligonucleotide
  source 1..37: mol_type = other DNA
gtttgagaatagtgtaatttcataaggtagtaaaact

SEQ ID NO: 29300 - DNA, 36 bp, synthetic construct
  misc_feature 1..36: note = Synthetic oligonucleotide
  source 1..36: mol_type = other DNA
gtttgagaatagtgtaatttcataaggtattaaaac

SEQ ID NO: 29301 - DNA, 36 bp, synthetic construct; identical to SEQ ID NO: 29300
  misc_feature 1..36: note = Synthetic oligonucleotide
  source 1..36: mol_type = other DNA

SEQ ID NO: 29302 - DNA, 36 bp, synthetic construct; identical to SEQ ID NO: 14282
  misc_feature 1..36: note = Synthetic oligonucleotide
  source 1..36: mol_type = other DNA

SEQ ID NO: 29303 - DNA, 36 bp, synthetic construct; identical to SEQ ID NO: 14282
  misc_feature 1..36: note = Synthetic oligonucleotide
  source 1..36: mol_type = other DNA

SEQ ID NO: 29304 - DNA, 36 bp, synthetic construct; identical to SEQ ID NO: 14282
  misc_feature 1..36: note = Synthetic oligonucleotide
  source 1..36: mol_type = other DNA

SEQ ID NO: 29305 - DNA, 37 bp, synthetic construct
  misc_feature 1..37: note = Synthetic oligonucleotide
  source 1..37: mol_type = other DNA
gtttgagaatagtgtgatttcataaggtagtaaaaca

SEQ ID NO: 29306 - DNA, 19 bp, synthetic construct
  misc_feature 1..19: note = Synthetic oligonucleotide
  source 1..19: mol_type = other DNA
gtttgagaatgatgtaaaa

SEQ ID NO: 29307 - DNA, 36 bp, synthetic construct; identical to SEQ ID NO: 14283
  misc_feature 1..36: note = Synthetic oligonucleotide
  source 1..36: mol_type = other DNA

SEQ ID NO: 29308 - DNA, 36 bp, synthetic construct; identical to SEQ ID NO: 14283
  misc_feature 1..36: note = Synthetic oligonucleotide
  source 1..36: mol_type = other DNA

SEQ ID NO: 29309 - DNA, 36 bp, synthetic construct; identical to SEQ ID NO: 14283
  misc_feature 1..36: note = Synthetic oligonucleotide
  source 1..36: mol_type = other DNA

SEQ ID NO: 29310 - DNA, 36 bp, synthetic construct; identical to SEQ ID NO: 14283
  misc_feature 1..36: note = Synthetic oligonucleotide
  source 1..36: mol_type = other DNA

SEQ ID NO: 29311 - DNA, 36 bp, synthetic construct; identical to SEQ ID NO: 14284
  misc_feature 1..36: note = Synthetic oligonucleotide
  source 1..36: mol_type = other DNA

SEQ ID NO: 29312 - DNA, 28 bp, synthetic construct
  misc_feature 1..28: note = Synthetic oligonucleotide
  source 1..28: mol_type = other DNA
gtttgagaatgatgtaaaaatgtatggt

SEQ ID NO: 29313 - DNA, 36 bp, synthetic construct; identical to SEQ ID NO: 14285
  misc_feature 1..36: note = Synthetic oligonucleotide
  source 1..36: mol_type = other DNA

SEQ ID NO: 29314 - DNA, 36 bp, synthetic construct; identical to SEQ ID NO: 14285
  misc_feature 1..36: note = Synthetic oligonucleotide
  source 1..36: mol_type = other DNA

SEQ ID NO: 29315 - DNA, 36 bp, synthetic construct; identical to SEQ ID NO: 14285
  misc_feature 1..36: note = Synthetic oligonucleotide
  source 1..36: mol_type = other DNA

SEQ ID NO: 29316 - DNA, 36 bp, synthetic construct; identical to SEQ ID NO: 14285
  misc_feature 1..36: note = Synthetic oligonucleotide
  source 1..36: mol_type = other DNA

SEQ ID NO: 29317 - DNA, 36 bp, synthetic construct; identical to SEQ ID NO: 14287
  misc_feature 1..36: note = Synthetic oligonucleotide
  source 1..36: mol_type = other DNA

SEQ ID NO: 29318 - DNA, 36 bp, synthetic construct; identical to SEQ ID NO: 14287
  misc_feature 1..36: note = Synthetic oligonucleotide
  source 1..36: mol_type = other DNA

SEQ ID NO: 29319 - DNA, 36 bp, synthetic construct; identical to SEQ ID NO: 14287
  misc_feature 1..36: note = Synthetic oligonucleotide
  source 1..36: mol_type = other DNA

SEQ ID NO: 29320 - DNA, 36 bp, synthetic construct; identical to SEQ ID NO: 14287
  misc_feature 1..36: note = Synthetic oligonucleotide
  source 1..36: mol_type = other DNA

SEQ ID NO: 29321 - DNA, 36 bp, synthetic construct; identical to SEQ ID NO: 14287
  misc_feature 1..36: note = Synthetic oligonucleotide
  source 1..36: mol_type = other DNA

SEQ ID NO: 29322 - DNA, 36 bp, synthetic construct; identical to SEQ ID NO: 14287
  misc_feature 1..36: note = Synthetic oligonucleotide
  source 1..36: mol_type = other DNA

SEQ ID NO: 29323 - DNA, 36 bp, synthetic construct; identical to SEQ ID NO: 14287
  misc_feature 1..36: note = Synthetic oligonucleotide
  source 1..36: mol_type = other DNA

SEQ ID NO: 29324 - DNA, 36 bp, synthetic construct; identical to SEQ ID NO: 14287
  misc_feature 1..36: note = Synthetic oligonucleotide
  source 1..36: mol_type = other DNA

SEQ ID NO: 29325 - DNA, 36 bp, synthetic construct; identical to SEQ ID NO: 14287
  misc_feature 1..36: note = Synthetic oligonucleotide
  source 1..36: mol_type = other DNA

SEQ ID NO: 29326 - DNA, 36 bp, synthetic construct; identical to SEQ ID NO: 14287
  misc_feature 1..36: note = Synthetic oligonucleotide
  source 1..36: mol_type = other DNA

SEQ ID NO: 29327 - DNA, 36 bp, synthetic construct; identical to SEQ ID NO: 14287
  misc_feature 1..36: note = Synthetic oligonucleotide
  source 1..36: mol_type = other DNA

SEQ ID NO: 29328 - DNA, 36 bp, synthetic construct; identical to SEQ ID NO: 14287
  misc_feature 1..36: note = Synthetic oligonucleotide
  source 1..36: mol_type = other DNA

SEQ ID NO: 29329 - DNA, 36 bp, synthetic construct; identical to SEQ ID NO: 14287
  misc_feature 1..36: note = Synthetic oligonucleotide
  source 1..36: mol_type = other DNA

SEQ ID NO: 29330 - DNA, 36 bp, synthetic construct; identical to SEQ ID NO: 14287
  misc_feature 1..36: note = Synthetic oligonucleotide
  source 1..36: mol_type = other DNA

SEQ ID NO: 29331 - DNA, 36 bp, synthetic construct; identical to SEQ ID NO: 14287
  misc_feature 1..36: note = Synthetic oligonucleotide
  source 1..36: mol_type = other DNA

SEQ ID NO: 29332 - DNA, 36 bp, synthetic construct; identical to SEQ ID NO: 14287
  misc_feature 1..36: note = Synthetic oligonucleotide
  source 1..36: mol_type = other DNA

SEQ ID NO: 29333 - DNA, 36 bp, synthetic construct; identical to SEQ ID NO: 14287
  misc_feature 1..36: note = Synthetic oligonucleotide
  source 1..36: mol_type = other DNA

SEQ ID NO: 29334 - DNA, 36 bp, synthetic construct; identical to SEQ ID NO: 14287
  misc_feature 1..36: note = Synthetic oligonucleotide
  source 1..36: mol_type = other DNA

SEQ ID NO: 29335 - DNA, 36 bp, synthetic construct; identical to SEQ ID NO: 14287
  misc_feature 1..36: note = Synthetic oligonucleotide
  source 1..36: mol_type = other DNA

SEQ ID NO: 29336 - DNA, 36 bp, synthetic construct; identical to SEQ ID NO: 14287
  misc_feature 1..36: note = Synthetic oligonucleotide
  source 1..36: mol_type = other DNA

SEQ ID NO: 29337 - DNA, 36 bp, synthetic construct; identical to SEQ ID NO: 14287
  misc_feature 1..36: note = Synthetic oligonucleotide
  source 1..36: mol_type = other DNA

SEQ ID NO: 29338 - DNA, 36 bp, synthetic construct; identical to SEQ ID NO: 14287
  misc_feature 1..36: note = Synthetic oligonucleotide
  source 1..36: mol_type = other DNA

SEQ ID NO: 29339 - DNA, 36 bp, synthetic construct; identical to SEQ ID NO: 14287
  misc_feature 1..36: note = Synthetic oligonucleotide
  source 1..36: mol_type = other DNA

SEQ ID NO: 29340 - DNA, 36 bp, synthetic construct; identical to SEQ ID NO: 14287
  misc_feature 1..36: note = Synthetic oligonucleotide
  source 1..36: mol_type = other DNA

SEQ ID NO: 29341 - DNA, 36 bp, synthetic construct; identical to SEQ ID NO: 14287
  misc_feature 1..36: note = Synthetic oligonucleotide
  source 1..36: mol_type = other DNA

SEQ ID NO: 29342 - DNA, 36 bp, synthetic construct; identical to SEQ ID NO: 14287
  misc_feature 1..36: note = Synthetic oligonucleotide
  source 1..36: mol_type = other DNA

SEQ ID NO: 29343 - DNA, 36 bp, synthetic construct; identical to SEQ ID NO: 14287
  misc_feature 1..36: note = Synthetic oligonucleotide
  source 1..36: mol_type = other DNA

SEQ ID NO: 29344 - DNA, 36 bp, synthetic construct; identical to SEQ ID NO: 14287
  misc_feature 1..36: note = Synthetic oligonucleotide
  source 1..36: mol_type = other DNA

SEQ ID NO: 29345 - DNA, 36 bp, synthetic construct; identical to SEQ ID NO: 14287
  misc_feature 1..36: note = Synthetic oligonucleotide
  source 1..36: mol_type = other DNA

SEQ ID NO: 29346 - DNA, 36 bp, synthetic construct; identical to SEQ ID NO: 14287
  misc_feature 1..36: note = Synthetic oligonucleotide
  source 1..36: mol_type = other DNA

SEQ ID NO: 29347 - DNA, 36 bp, synthetic construct; identical to SEQ ID NO: 14287
  misc_feature 1..36: note = Synthetic oligonucleotide
  source 1..36: mol_type = other DNA

SEQ ID NO: 29348 - DNA, 36 bp, synthetic construct; identical to SEQ ID NO: 14287
  misc_feature 1..36: note = Synthetic oligonucleotide
  source 1..36: mol_type = other DNA

SEQ ID NO: 29349 - DNA, 36 bp, synthetic construct; identical to SEQ ID NO: 14287
  misc_feature 1..36: note = Synthetic oligonucleotide
  source 1..36: mol_type = other DNA

SEQ ID NO: 29350 - DNA, 36 bp, synthetic construct; identical to SEQ ID NO: 14287
  misc_feature 1..36: note = Synthetic oligonucleotide
  source 1..36: mol_type = other DNA

SEQ ID NO: 29351 - DNA, 36 bp, synthetic construct; identical to SEQ ID NO: 14287
  misc_feature 1..36: note = Synthetic oligonucleotide
  source 1..36: mol_type = other DNA

SEQ ID NO: 29352 - DNA, 36 bp, synthetic construct; identical to SEQ ID NO: 14287
  misc_feature 1..36: note = Synthetic oligonucleotide
  source 1..36: mol_type = other DNA

SEQ ID NO: 29353 - DNA, 37 bp, synthetic construct
  misc_feature 1..37: note = Synthetic oligonucleotide
  source 1..37: mol_type = other DNA
gtttgagaatgatgtaaaaatgtatggtactcaaacg

SEQ ID NO: 29354 - DNA, 36 bp, synthetic construct; identical to SEQ ID NO: 14288
  misc_feature 1..36: note = Synthetic oligonucleotide
  source 1..36: mol_type = other DNA

SEQ ID NO: 29355 - DNA, 36 bp, synthetic construct; identical to SEQ ID NO: 14288
  misc_feature 1..36: note = Synthetic oligonucleotide
  source 1..36: mol_type = other DNA

SEQ ID NO: 29356 - DNA, 36 bp, synthetic construct; identical to SEQ ID NO: 14288
  misc_feature 1..36: note = Synthetic oligonucleotide
  source 1..36: mol_type = other DNA

SEQ ID NO: 29357 - DNA, 36 bp, synthetic construct; identical to SEQ ID NO: 14288
  misc_feature 1..36: note = Synthetic oligonucleotide
  source 1..36: mol_type = other DNA

SEQ ID NO: 29358 - DNA, 36 bp, synthetic construct; identical to SEQ ID NO: 14288
  misc_feature 1..36: note = Synthetic oligonucleotide
  source 1..36: mol_type = other DNA

SEQ ID NO: 29359 - DNA, 36 bp, synthetic construct
  misc_feature 1..36: note = Synthetic oligonucleotide
  source 1..36: mol_type = other DNA
gtttgagaatgatgtaaaaatgtatggtacttaaac

SEQ ID NO: 29360 - DNA, 36 bp, synthetic construct; identical to SEQ ID NO: 14289
  misc_feature 1..36: note = Synthetic oligonucleotide
  source 1..36: mol_type = other DNA

SEQ ID NO: 29361 - DNA, 36 bp, synthetic construct
  misc_feature 1..36: note = Synthetic oligonucleotide
  source 1..36: mol_type = other DNA
gtttgagaatgatgtaaaaatgtatggtatttaaac

SEQ ID NO: 29362 - DNA, 36 bp, synthetic construct; identical to SEQ ID NO: 14290
  misc_feature 1..36: note = Synthetic oligonucleotide
  source 1..36: mol_type = other DNA

SEQ ID NO: 29363 - DNA, 36 bp, synthetic construct
  misc_feature 1..36: note = Synthetic oligonucleotide
  source 1..36: mol_type = other DNA
gtttgagaatgatgtaaaagtagatggtactcaaac

SEQ ID NO: 29364 - DNA, 36 bp, synthetic construct; identical to SEQ ID NO: 29363
  misc_feature 1..36: note = Synthetic oligonucleotide
  source 1..36: mol_type = other DNA

SEQ ID NO: 29365 - DNA, 36 bp, synthetic construct
  misc_feature 1..36: note = Synthetic oligonucleotide
  source 1..36: mol_type = other DNA
gtttgagaatgatgtaaagatatatggtattaaaac

SEQ ID NO: 29366 - DNA, 36 bp, synthetic construct; identical to SEQ ID NO: 14291
  misc_feature 1..36: note = Synthetic oligonucleotide
  source 1..36: mol_type = other DNA

SEQ ID NO: 29367 - DNA, 36 bp, synthetic construct
  misc_feature 1..36: note = Synthetic oligonucleotide
  source 1..36: mol_type = other DNA
gtttgagaatgatgtaaatatgtatgggactcaaac

SEQ ID NO: 29368 - DNA, 36 bp, synthetic construct; identical to SEQ ID NO: 29367
  misc_feature 1..36: note = Synthetic oligonucleotide
  source 1..36: mol_type = other DNA

SEQ ID NO: 29369 - DNA, 36 bp, synthetic construct
  misc_feature 1..36: note = Synthetic oligonucleotide
  source 1..36: mol_type = other DNA
gtttgagaatgatgtaaattagtatggtactcaagc

SEQ ID NO: 29370 - DNA, 36 bp, synthetic construct; identical to SEQ ID NO: 29369
  misc_feature 1..36: note = Synthetic oligonucleotide
  source 1..36: mol_type = other DNA

SEQ ID NO: 29371 - DNA, 36 bp, synthetic construct; identical to SEQ ID NO: 29369
  misc_feature 1..36: note = Synthetic oligonucleotide
  source 1..36: mol_type = other DNA

SEQ ID NO: 29372 - DNA, 36 bp, synthetic construct; identical to SEQ ID NO: 14296
  misc_feature 1..36: note = Synthetic oligonucleotide
  source 1..36: mol_type = other DNA

SEQ ID NO: 29373 - DNA, 36 bp, synthetic construct; identical to SEQ ID NO: 14296
  misc_feature 1..36: note = Synthetic oligonucleotide
  source 1..36: mol_type = other DNA

SEQ ID NO: 29374 - DNA, 36 bp, synthetic construct; identical to SEQ ID NO: 14296
  misc_feature 1..36: note = Synthetic oligonucleotide
  source 1..36: mol_type = other DNA

SEQ ID NO: 29375 - DNA, 36 bp, synthetic construct; identical to SEQ ID NO: 14296
  misc_feature 1..36: note = Synthetic oligonucleotide
  source 1..36: mol_type = other DNA

SEQ ID NO: 29376 - DNA, 36 bp, synthetic construct; identical to SEQ ID NO: 14296
  misc_feature 1..36: note = Synthetic oligonucleotide
  source 1..36: mol_type = other DNA

SEQ ID NO: 29377 - DNA, 36 bp, synthetic construct; identical to SEQ ID NO: 14296
  misc_feature 1..36: note = Synthetic oligonucleotide
  source 1..36: mol_type = other DNA

SEQ ID NO: 29378 - DNA, 36 bp, synthetic construct; identical to SEQ ID NO: 14296
  misc_feature 1..36: note = Synthetic oligonucleotide
  source 1..36: mol_type = other DNA

SEQ ID NO: 29379 - DNA, 36 bp, synthetic construct
  misc_feature 1..36: note = Synthetic oligonucleotide
  source 1..36: mol_type = other DNA
gtttgagaatgatgtagaaatgtatggtgctcaagc

SEQ ID NO: 29380 - DNA, 36 bp, synthetic construct; identical to SEQ ID NO: 14297
  misc_feature 1..36: note = Synthetic oligonucleotide
  source 1..36: mol_type = other DNA

SEQ ID NO: 29381 - DNA, 36 bp, synthetic construct; identical to SEQ ID NO: 14300
  misc_feature 1..36: note = Synthetic oligonucleotide
  source 1..36: mol_type = other DNA

SEQ ID NO: 29382 - DNA, 36 bp, synthetic construct; identical to SEQ ID NO: 14305
  misc_feature 1..36: note = Synthetic oligonucleotide
  source 1..36: mol_type = other DNA

SEQ ID NO: 29383 - DNA, 36 bp, synthetic construct; identical to SEQ ID NO: 14305
  misc_feature 1..36: note = Synthetic oligonucleotide
  source 1..36: mol_type = other DNA

SEQ ID NO: 29384 - DNA, 37 bp, synthetic construct
  misc_feature 1..37: note = Synthetic oligonucleotide
  source 1..37: mol_type = other DNA
gtttgagaatggtgtaatttcatatggtggtcaaaca

SEQ ID NO: 29385 - DNA, 36 bp, synthetic construct
  misc_feature 1..36: note = Synthetic oligonucleotide
  source 1..36: mol_type = other DNA
gtttgagacatttacagaatcacactactctcaaac

SEQ ID NO: 29386 - DNA, 36 bp, synthetic construct
  misc_feature 1..36: note = Synthetic oligonucleotide
  source 1..36: mol_type = other DNA
gtttgagacccctacagaattacactgctctcaaac

SEQ ID NO: 29387 - DNA, 36 bp, synthetic construct
  misc_feature 1..36: note = Synthetic oligonucleotide
  source 1..36: mol_type = other DNA
gtttgagacccctacagaattactctgctctcaaac

SEQ ID NO: 29388 - DNA, 37 bp, synthetic construct
  misc_feature 1..37: note = Synthetic oligonucleotide
  source 1..37: mol_type = other DNA
gtttgagacccctatagatttacactactctcaaact

SEQ ID NO: 29389 - DNA, 37 bp, synthetic construct; identical to SEQ ID NO: 29388
  misc_feature 1..37: note = Synthetic oligonucleotide
  source 1..37: mol_type = other DNA

SEQ ID NO: 29390 - DNA, 36 bp, synthetic construct
  misc_feature 1..36: note = Synthetic oligonucleotide
  source 1..36: mol_type = other DNA
gtttgagacccctatgaatttacacagctctcaaac

SEQ ID NO: 29391 - DNA, 36 bp, synthetic construct
  misc_feature 1..36: note = Synthetic oligonucleotide
  source 1..36: mol_type = other DNA
gtttgagacccctatggaattacactgctctcaaac

SEQ ID NO: 29392 - DNA, 36 bp, synthetic construct; identical to SEQ ID NO: 29391
  misc_feature 1..36: note = Synthetic oligonucleotide
  source 1..36: mol_type = other DNA

SEQ ID NO: 29393 - DNA, 36 bp, synthetic construct; identical to SEQ ID NO: 29391
  misc_feature 1..36: note = Synthetic oligonucleotide
  source 1..36: mol_type = other DNA

SEQ ID NO: 29394 - DNA, 36 bp, synthetic construct; identical to SEQ ID NO: 29391
  misc_feature 1..36: note = Synthetic oligonucleotide
  source 1..36: mol_type = other DNA

SEQ ID NO: 29395 - DNA, 36 bp, synthetic construct; identical to SEQ ID NO: 29391
  misc_feature 1..36: note = Synthetic oligonucleotide
  source 1..36: mol_type = other DNA

SEQ ID NO: 29396 - DNA, 36 bp, synthetic construct; identical to SEQ ID NO: 29391
  misc_feature 1..36: note = Synthetic oligonucleotide
  source 1..36: mol_type = other DNA

SEQ ID NO: 29397 - DNA, 36 bp, synthetic construct; identical to SEQ ID NO: 29391
  misc_feature 1..36: note = Synthetic oligonucleotide
  source 1..36: mol_type = other DNA

SEQ ID NO: 29398 - DNA, 36 bp, synthetic construct; identical to SEQ ID NO: 29391
  misc_feature 1..36: note = Synthetic oligonucleotide
  source 1..36: mol_type = other DNA

SEQ ID NO: 29399 - DNA, 36 bp, synthetic construct; identical to SEQ ID NO: 29391
  misc_feature 1..36: note = Synthetic oligonucleotide
  source 1..36: mol_type = other DNA

SEQ ID NO: 29400 - DNA, 36 bp, synthetic construct; identical to SEQ ID NO: 29391
  misc_feature 1..36: note = Synthetic oligonucleotide
  source 1..36: mol_type = other DNA

SEQ ID NO: 29401 - DNA, 36 bp, synthetic construct; identical to SEQ ID NO: 29391
  misc_feature 1..36: note = Synthetic oligonucleotide
  source 1..36: mol_type = other DNA

SEQ ID NO: 29402 - DNA, 36 bp, synthetic construct
  misc_feature 1..36: note = Synthetic oligonucleotide
  source 1..36: mol_type = other DNA
gtttgagacctattcagaattacatcactctcaaac

SEQ ID NO: 29403 - DNA, 36 bp, synthetic construct; identical to SEQ ID NO: 29402
  misc_feature 1..36: note = Synthetic oligonucleotide
  source 1..36: mol_type = other DNA

SEQ ID NO: 29404 - DNA, 35 bp, synthetic construct
  misc_feature 1..35: note = Synthetic oligonucleotide
  source 1..35: mol_type = other DNA
gtttgagagatatgtaaattcaaaggataatcaaa

SEQ ID NO: 29405 - DNA, 36 bp, synthetic construct
  misc_feature 1..36: note = Synthetic oligonucleotide
  source 1..36: mol_type = other DNA
gtttgagagatatgtaaattcaaaggataatcaaac

SEQ ID NO: 29406 - DNA, 36 bp, synthetic construct; identical to SEQ ID NO: 29405
  misc_feature 1..36: note = Synthetic oligonucleotide
  source 1..36: mol_type = other DNA

SEQ ID NO: 29407 - DNA, 36 bp, synthetic construct; identical to SEQ ID NO: 29405
  misc_feature 1..36: note = Synthetic oligonucleotide
  source 1..36: mol_type = other DNA

SEQ ID NO: 29408 - DNA, 36 bp, synthetic construct; identical to SEQ ID NO: 29405
  misc_feature 1..36: note = Synthetic oligonucleotide
  source 1..36: mol_type = other DNA

SEQ ID NO: 29409 - DNA, 36 bp, synthetic construct; identical to SEQ ID NO: 29405
  misc_feature 1..36: note = Synthetic oligonucleotide
  source 1..36: mol_type = other DNA

SEQ ID NO: 29410 - DNA, 36 bp, synthetic construct; identical to SEQ ID NO: 29405
  misc_feature 1..36: note = Synthetic oligonucleotide
  source 1..36: mol_type = other DNA

SEQ ID NO: 29411 - DNA, 36 bp, synthetic construct; identical to SEQ ID NO: 14313
  misc_feature 1..36: note = Synthetic oligonucleotide
  source 1..36: mol_type = other DNA

SEQ ID NO: 29412 - DNA, 36 bp, synthetic construct; identical to SEQ ID NO: 14313
  misc_feature 1..36: note = Synthetic oligonucleotide
  source 1..36: mol_type = other DNA

SEQ ID NO: 29413 - DNA, 36 bp, synthetic construct; identical to SEQ ID NO: 14313
  misc_feature 1..36: note = Synthetic oligonucleotide
  source 1..36: mol_type = other DNA

SEQ ID NO: 29414 - DNA, 36 bp, synthetic construct; identical to SEQ ID NO: 14313
  misc_feature 1..36: note = Synthetic oligonucleotide
  source 1..36: mol_type = other DNA

SEQ ID NO: 29415 - DNA, 36 bp, synthetic construct; identical to SEQ ID NO: 14313
  misc_feature 1..36: note = Synthetic oligonucleotide
  source 1..36: mol_type = other DNA

SEQ ID NO: 29416 - DNA, 36 bp, synthetic construct; identical to SEQ ID NO: 14313
  misc_feature 1..36: note = Synthetic oligonucleotide
  source 1..36: mol_type = other DNA

SEQ ID NO: 29417 - DNA, 36 bp, synthetic construct; identical to SEQ ID NO: 14313
  misc_feature 1..36: note = Synthetic oligonucleotide
  source 1..36: mol_type = other DNA

SEQ ID NO: 29418 - DNA, 36 bp, synthetic construct; identical to SEQ ID NO: 14313
  misc_feature 1..36: note = Synthetic oligonucleotide
  source 1..36: mol_type = other DNA

SEQ ID NO: 29419 - DNA, 35 bp, synthetic construct; identical to SEQ ID NO: 14315
  misc_feature 1..35: note = Synthetic oligonucleotide
  source 1..35: mol_type = other DNA

SEQ ID NO: 29420 - DNA, 35 bp, synthetic construct; identical to SEQ ID NO: 14315
  misc_feature 1..35: note = Synthetic oligonucleotide
  source 1..35: mol_type = other DNA

SEQ ID NO: 29421 - DNA, 35 bp, synthetic construct; identical to SEQ ID NO: 14315
  misc_feature 1..35: note = Synthetic oligonucleotide
  source 1..35: mol_type = other DNA

SEQ ID NO: 29422 - DNA, 36 bp, synthetic construct; identical to SEQ ID NO: 14316
  misc_feature 1..36: note = Synthetic oligonucleotide
  source 1..36: mol_type = other DNA

SEQ ID NO: 29423 - DNA, 35 bp, synthetic construct
  misc_feature 1..35: note = Synthetic oligonucleotide
  source 1..35: mol_type = other DNA
gtttgagagatatgtaaattttgattcttcaaaac

SEQ ID NO: 29424 - DNA, 36 bp, synthetic construct; identical to SEQ ID NO: 14319
  misc_feature 1..36: note = Synthetic oligonucleotide
  source 1..36: mol_type = other DNA

SEQ ID NO: 29425 - DNA, 36 bp, synthetic construct
  misc_feature 1..36: note = Synthetic oligonucleotide
  source 1..36: mol_type = other DNA
gtttgagagcaatgtaaattcatagaggtataaaac

SEQ ID NO: 29426 - DNA, 36 bp, synthetic construct
  misc_feature 1..36: note = Synthetic oligonucleotide
  source 1..36: mol_type = other DNA
gtttgagagcagtgcaaattcgtaggggaatcaaac

SEQ ID NO: 29427 - DNA, 36 bp, synthetic construct; identical to SEQ ID NO: 29426
  misc_feature 1..36: note = Synthetic oligonucleotide
  source 1..36: mol_type = other DNA

SEQ ID NO: 29428 - DNA, 36 bp, synthetic construct; identical to SEQ ID NO: 29426
  misc_feature 1..36: note = Synthetic oligonucleotide
  source 1..36: mol_type = other DNA

SEQ ID NO: 29429 - DNA, 36 bp, synthetic construct; identical to SEQ ID NO: 29426
  misc_feature 1..36: note = Synthetic oligonucleotide
  source 1..36: mol_type = other DNA

SEQ ID NO: 29430 - DNA, 36 bp, synthetic construct; identical to SEQ ID NO: 29426
  misc_feature 1..36: note = Synthetic oligonucleotide
  source 1..36: mol_type = other DNA

SEQ ID NO: 29431 - DNA, 36 bp, synthetic construct; identical to SEQ ID NO: 29426
  misc_feature 1..36: note = Synthetic oligonucleotide
  source 1..36: mol_type = other DNA

SEQ ID NO: 29432 - DNA, 36 bp, synthetic construct; identical to SEQ ID NO: 29426
  misc_feature 1..36: note = Synthetic oligonucleotide
  source 1..36: mol_type = other DNA

SEQ ID NO: 29433 - DNA, 36 bp, synthetic construct; identical to SEQ ID NO: 29426
  misc_feature 1..36: note = Synthetic oligonucleotide
  source 1..36: mol_type = other DNA

SEQ ID NO: 29434 - DNA, 36 bp, synthetic construct
  misc_feature 1..36: note = Synthetic oligonucleotide
  source 1..36: mol_type = other DNA
gtttgagagcagtgcagttttataggggtctcaaac

SEQ ID NO: 29435 - DNA, 31 bp, synthetic construct
  misc_feature 1..31: note = Synthetic oligonucleotide
  source 1..31: mol_type = other DNA
gtttgagagcagtgtaaatacataggggtaa

SEQ ID NO: 29436 - DNA, 36 bp, synthetic construct
  misc_feature 1..36: note = Synthetic oligonucleotide
  source 1..36: mol_type = other DNA
gtttgagagcagtgtaaattcagagggtattgaagc

SEQ ID NO: 29437 - DNA, 36 bp, synthetic construct
  misc_feature 1..36: note = Synthetic oligonucleotide
  source 1..36: mol_type = other DNA
gtttgagagcagtgtaaattcagatggtactcaaac

SEQ ID NO: 29438 - DNA, 25 bp, synthetic construct
  misc_feature 1..25: note = Synthetic oligonucleotide
  source 1..25: mol_type = other DNA
gtttgagagcagtgtaaattcatag

SEQ ID NO: 29439 - DNA, 27 bp, synthetic construct
  misc_feature 1..27: note = Synthetic oligonucleotide
  source 1..27: mol_type = other DNA
gtttgagagcagtgtaaattcataggg

SEQ ID NO: 29440 - DNA, 36 bp, synthetic construct
  misc_feature 1..36: note = Synthetic oligonucleotide
  source 1..36: mol_type = other DNA
gtttgagagcagtgtaaattcataggggtaacaaac

SEQ ID NO: 29441 - DNA, 36 bp, synthetic construct; identical to SEQ ID NO: 29440
  misc_feature 1..36: note = Synthetic oligonucleotide
  source 1..36: mol_type = other DNA

SEQ ID NO: 29442 - DNA, 38 bp, synthetic construct
  misc_feature 1..38: note = Synthetic oligonucleotide
  source 1..38: mol_type = other DNA
gtttgagagcagtgtaaattcataggggtaacaaacat

SEQ ID NO: 29443 - DNA, 27 bp, synthetic construct
  misc_feature 1..27: note = Synthetic oligonucleotide
  source 1..27: mol_type = other DNA
gtttgagagcagtgtaaattcgtaggg

SEQ ID NO: 29444 - DNA, 27 bp, synthetic construct
  misc_feature 1..27: note = Synthetic oligonucleotide
  source 1..27: mol_type = other DNA
gtttgagagcagtgtaaattcgtaggg

SEQ ID NO: 29445 - DNA, 36 bp, synthetic construct
  misc_feature 1..36: note = Synthetic oligonucleotide
  source 1..36: mol_type = other DNA
gtttgagagcagtgtaaattcgtagggaaaacaaac

SEQ ID NO: 29446 - DNA, 36 bp, synthetic construct; identical to SEQ ID NO: 29445
  misc_feature 1..36: note = Synthetic oligonucleotide
  source 1..36: mol_type = other DNA

SEQ ID NO: 29447 - DNA, 37 bp, synthetic construct
  misc_feature 1..37: note = Synthetic oligonucleotide
  source 1..37: mol_type = other DNA
gtttgagagcagtgtaaattcgtagggaaaacaaaca

SEQ ID NO: 29448 - DNA, 36 bp, synthetic construct; identical to SEQ ID NO: 14326
  misc_feature 1..36: note = Synthetic oligonucleotide
  source 1..36: mol_type = other DNA

SEQ ID NO: 29449 - DNA, 36 bp, synthetic construct; identical to SEQ ID NO: 14326
  misc_feature 1..36: note = Synthetic oligonucleotide
  source 1..36: mol_type = other DNA

SEQ ID NO: 29450 - DNA, 36 bp, synthetic construct; identical to SEQ ID NO: 14326
  misc_feature 1..36: note = Synthetic oligonucleotide
  source 1..36: mol_type = other DNA

SEQ ID NO: 29451 - DNA, 36 bp, synthetic construct; identical to SEQ ID NO: 14326
  misc_feature 1..36: note = Synthetic oligonucleotide
  source 1..36: mol_type = other DNA

SEQ ID NO: 29452 - DNA, 36 bp, synthetic construct; identical to SEQ ID NO: 14326
  misc_feature 1..36: note = Synthetic oligonucleotide
  source 1..36: mol_type = other DNA

SEQ ID NO: 29453 - DNA, 36 bp, synthetic construct; identical to SEQ ID NO: 14328
  misc_feature 1..36: note = Synthetic oligonucleotide
  source 1..36: mol_type = other DNA

SEQ ID NO: 29454 - DNA, 36 bp, synthetic construct; identical to SEQ ID NO: 14328
  misc_feature 1..36: note = Synthetic oligonucleotide
  source 1..36: mol_type = other DNA

SEQ ID NO: 29455 - DNA, 36 bp, synthetic construct; identical to SEQ ID NO: 14328
  misc_feature 1..36: note = Synthetic oligonucleotide
  source 1..36: mol_type = other DNA

SEQ ID NO: 29456 - DNA, 36 bp, synthetic construct; identical to SEQ ID NO: 14328
  misc_feature 1..36: note = Synthetic oligonucleotide
  source 1..36: mol_type = other DNA

SEQ ID NO: 29457 - DNA, 36 bp, synthetic construct; identical to SEQ ID NO: 14328
  misc_feature 1..36: note = Synthetic oligonucleotide
  source 1..36: mol_type = other DNA

SEQ ID NO: 29458 - DNA, 36 bp, synthetic construct; identical to SEQ ID NO: 14328
  misc_feature 1..36: note = Synthetic oligonucleotide
  source 1..36: mol_type = other DNA

SEQ ID NO: 29459 - DNA, 36 bp, synthetic construct; identical to SEQ ID NO: 14328
  misc_feature 1..36: note = Synthetic oligonucleotide
  source 1..36: mol_type = other DNA

SEQ ID NO: 29460 - DNA, 36 bp, synthetic construct; identical to SEQ ID NO: 14328
  misc_feature 1..36: note = Synthetic oligonucleotide
  source 1..36: mol_type = other DNA

SEQ ID NO: 29461 - DNA, 36 bp, synthetic construct; identical to SEQ ID NO: 14328
  misc_feature 1..36: note = Synthetic oligonucleotide
  source 1..36: mol_type = other DNA

SEQ ID NO: 29462 - DNA, 36 bp, synthetic construct
  misc_feature 1..36: note = Synthetic oligonucleotide
  source 1..36: mol_type = other DNA
gtttgagagcagtgtaattccatagggtactcaaac

SEQ ID NO: 29463 - DNA, 36 bp, synthetic construct; identical to SEQ ID NO: 29462
  misc_feature 1..36: note = Synthetic oligonucleotide
  source 1..36: mol_type = other DNA

SEQ ID NO: 29464 - DNA, 36 bp, synthetic construct
  misc_feature 1..36: note = Synthetic oligonucleotide
  source 1..36: mol_type = other DNA
gtttgagagcagtgtaattctgtaggggtctcaaac

SEQ ID NO: 29465 - DNA, 36 bp, synthetic construct; identical to SEQ ID NO: 29464
  misc_feature 1..36: note = Synthetic oligonucleotide
  source 1..36: mol_type = other DNA

SEQ ID NO: 29466 - DNA, 36 bp, synthetic construct
  misc_feature 1..36: note = Synthetic oligonucleotide
  source 1..36: mol_type = other DNA
gtttgagagcagtgttaatccataggggattgaaac

SEQ ID NO: 29467 - DNA, 36 bp, synthetic construct
  misc_feature 1..36: note = Synthetic oligonucleotide
  source 1..36: mol_type = other DNA
gtttgagagcagtgttatcttcaatagttccgaaac

SEQ ID NO: 29468 - DNA, 36 bp, synthetic construct
  misc_feature 1..36: note = Synthetic oligonucleotide
  source 1..36: mol_type = other DNA
gtttgagagccgtgtatttccagaggggactcaaac

SEQ ID NO: 29469 - DNA, 36 bp, synthetic construct
  misc_feature 1..36: note = Synthetic oligonucleotide
  source 1..36: mol_type = other DNA
gtttgagagccttgctaattcagatgggtgtagaac

SEQ ID NO: 29470 - DNA, 36 bp, synthetic construct
  misc_feature 1..36: note = Synthetic oligonucleotide
  source 1..36: mol_type = other DNA
gtttgagagccttgttaattcaaataggtctaaaac

SEQ ID NO: 29471 - DNA, 36 bp, synthetic construct
  misc_feature 1..36: note = Synthetic oligonucleotide
  source 1..36: mol_type = other DNA
gtttgagagccttgttaattcaagtagtggtaaaac

SEQ ID NO: 29472 - DNA, 36 bp, synthetic construct
  misc_feature 1..36: note = Synthetic oligonucleotide
  source 1..36: mol_type = other DNA
gtttgagagccttgttaattcagataggtgcaaaac

SEQ ID NO: 29473 - DNA, 36 bp, synthetic construct; identical to SEQ ID NO: 29472
  misc_feature 1..36: note = Synthetic oligonucleotide
  source 1..36: mol_type = other DNA

SEQ ID NO: 29474 - DNA, 36 bp, synthetic construct; identical to SEQ ID NO: 14338
  misc_feature 1..36: note = Synthetic oligonucleotide
  source 1..36: mol_type = other DNA

SEQ ID NO: 29475 - DNA, 36 bp, synthetic construct
  misc_feature 1..36: note = Synthetic oligonucleotide
  source 1..36: mol_type = other DNA
gtttgagagccttgttattttgtatcactcttaaac

SEQ ID NO: 29476 - DNA, 36 bp, synthetic construct
  misc_feature 1..36: note = Synthetic oligonucleotide
  source 1..36: mol_type = other DNA
gtttgagagccttgttgttttgtaactgtcttaaac

SEQ ID NO: 29477 - DNA, 36 bp, synthetic construct
  misc_feature 1..36: note = Synthetic oligonucleotide
  source 1..36: mol_type = other DNA
gtttgagagccttgttgttttgtaattctcttaaac

SEQ ID NO: 29478 - DNA, 21 bp, synthetic construct
  misc_feature 1..21: note = Synthetic oligonucleotide
  source 1..21: mol_type = other DNA
gtttgagagctgtgcgatttc

SEQ ID NO: 29479 - DNA, 36 bp, synthetic construct
  misc_feature 1..36: note = Synthetic oligonucleotide
  source 1..36: mol_type = other DNA
gtttgagagctgtgcgttttcgtaggggagtcaaac

SEQ ID NO: 29480 - DNA, 36 bp, synthetic construct
  misc_feature 1..36: note = Synthetic oligonucleotide
  source 1..36: mol_type = other DNA
gtttgagagctgtgtaaatccagaggggtacaaagc

SEQ ID NO: 29481 - DNA, 36 bp, synthetic construct; identical to SEQ ID NO: 29480
  misc_feature 1..36: note = Synthetic oligonucleotide
  source 1..36: mol_type = other DNA

SEQ ID NO: 29482 - DNA, 36 bp, synthetic construct
  misc_feature 1..36: note = Synthetic oligonucleotide
  source 1..36: mol_type = other DNA
gtttgagagctgtgttgttttagatggtagtcaaac

SEQ ID NO: 29483 - DNA, 36 bp, synthetic construct
  misc_feature 1..36: note = Synthetic oligonucleotide
  source 1..36: mol_type = other DNA
gtttgagagctttgctaattcaaaaagatacaaaac

SEQ ID NO: 29484 - DNA, 36 bp, synthetic construct; identical to SEQ ID NO: 29483
  misc_feature 1..36: note = Synthetic oligonucleotide
  source 1..36: mol_type = other DNA

SEQ ID NO: 29485 - DNA, 36 bp, synthetic construct; identical to SEQ ID NO: 29483
  misc_feature 1..36: note = Synthetic oligonucleotide
  source 1..36: mol_type = other DNA

SEQ ID NO: 29486 - DNA, 36 bp, synthetic construct; identical to SEQ ID NO: 29483
  misc_feature 1..36: note = Synthetic oligonucleotide
  source 1..36: mol_type = other DNA

SEQ ID NO: 29487 - DNA, 36 bp, synthetic construct; identical to SEQ ID NO: 29483
  misc_feature 1..36: note = Synthetic oligonucleotide
  source 1..36: mol_type = other DNA

SEQ ID NO: 29488 - DNA, 36 bp, synthetic construct; identical to SEQ ID NO: 29483
  misc_feature 1..36: note = Synthetic oligonucleotide
  source 1..36: mol_type = other DNA

SEQ ID NO: 29489 - DNA, 36 bp, synthetic construct; identical to SEQ ID NO: 29483
  misc_feature 1..36: note = Synthetic oligonucleotide
  source 1..36: mol_type = other DNA

SEQ ID NO: 29490 - DNA, 36 bp, synthetic construct; identical to SEQ ID NO: 29483
  misc_feature 1..36: note = Synthetic oligonucleotide
  source 1..36: mol_type = other DNA

SEQ ID NO: 29491 - DNA, 36 bp, synthetic construct; identical to SEQ ID NO: 29483
  misc_feature 1..36: note = Synthetic oligonucleotide
  source 1..36: mol_type = other DNA

SEQ ID NO: 29492 - DNA, 36 bp, synthetic construct
  misc_feature 1..36: note = Synthetic oligonucleotide
  source 1..36: mol_type = other DNA
gtttgagagctttgctaattcagaaagatacaaaac

SEQ ID NO: 29493 - DNA, 36 bp, synthetic construct
  misc_feature 1..36: note = Synthetic oligonucleotide
  source 1..36: mol_type = other DNA
gtttgagagctttgttaattcagaaagatacaaaac

SEQ ID NO: 29494 - DNA, 36 bp, synthetic construct
  misc_feature 1..36: note = Synthetic oligonucleotide
  source 1..36: mol_type = other DNA
gtttgagagctttgttaattcagaaagatgcaaaac

SEQ ID NO: 29495 - DNA, 36 bp, synthetic construct; identical to SEQ ID NO: 29494
  misc_feature 1..36: note = Synthetic oligonucleotide
  source 1..36: mol_type = other DNA

SEQ ID NO: 29496 - DNA, 36 bp, synthetic construct; identical to SEQ ID NO: 29494
  misc_feature 1..36: note = Synthetic oligonucleotide
  source 1..36: mol_type = other DNA

SEQ ID NO: 29497 - DNA, 36 bp, synthetic construct
  misc_feature 1..36: note = Synthetic oligonucleotide
  source 1..36: mol_type = other DNA
gtttgagagctttgttaattcagaaagatgtaaaac

SEQ ID NO: 29498 - DNA, 36 bp, synthetic construct; identical to SEQ ID NO: 29497
  misc_feature 1..36: note = Synthetic oligonucleotide
  source 1..36: mol_type = other DNA

SEQ ID NO: 29499 - DNA, 36 bp, synthetic construct; identical to SEQ ID NO: 29497
  misc_feature 1..36: note = Synthetic oligonucleotide
  source 1..36: mol_type = other DNA

SEQ ID NO: 29500 - DNA, 36 bp, synthetic construct; identical to SEQ ID NO: 29497
  misc_feature 1..36: note = Synthetic oligonucleotide
  source 1..36: mol_type = other DNA

SEQ ID NO: 29501 - DNA, 36 bp, synthetic construct
  misc_feature 1..36: note = Synthetic oligonucleotide
  source 1..36: mol_type = other DNA
gtttgagagctttgttaattcagaagaaagtaaaac

SEQ ID NO: 29502 - DNA, 36 bp, synthetic construct
  misc_feature 1..36: note = Synthetic oligonucleotide
  source 1..36: mol_type = other DNA
gtttgagagctttgttaattcagaagagagtaaaac

SEQ ID NO: 29503 - DNA, 36 bp, synthetic construct; identical to SEQ ID NO: 14349
  misc_feature 1..36: note = Synthetic oligonucleotide
  source 1..36: mol_type = other DNA

SEQ ID NO: 29504 - DNA, 36 bp, synthetic construct; identical to SEQ ID NO: 14349
  misc_feature 1..36: note = Synthetic oligonucleotide
  source 1..36: mol_type = other DNA

SEQ ID NO: 29505 - DNA, 36 bp, synthetic construct; identical to SEQ ID NO: 14349
  misc_feature 1..36: note = Synthetic oligonucleotide
  source 1..36: mol_type = other DNA

SEQ ID NO: 29506 - DNA, 36 bp, synthetic construct; identical to SEQ ID NO: 14349
  misc_feature 1..36: note = Synthetic oligonucleotide
  source 1..36: mol_type = other DNA

SEQ ID NO: 29507 - DNA, 36 bp, synthetic construct; identical to SEQ ID NO: 14350
  misc_feature 1..36: note = Synthetic oligonucleotide
  source 1..36: mol_type = other DNA

SEQ ID NO: 29508 - DNA, 36 bp, synthetic construct; identical to SEQ ID NO: 14351
  misc_feature 1..36: note = Synthetic oligonucleotide
  source 1..36: mol_type = other DNA

SEQ ID NO: 29509 - DNA, 36 bp, synthetic construct; identical to SEQ ID NO: 14353
  misc_feature 1..36: note = Synthetic oligonucleotide
  source 1..36: mol_type = other DNA

SEQ ID NO: 29510 - DNA, 36 bp, synthetic construct; identical to SEQ ID NO: 14353
  misc_feature 1..36: note = Synthetic oligonucleotide
  source 1..36: mol_type = other DNA

SEQ ID NO: 29511 - DNA, 36 bp, synthetic construct; identical to SEQ ID NO: 14353
  misc_feature 1..36: note = Synthetic oligonucleotide
  source 1..36: mol_type = other DNA

SEQ ID NO: 29512 - DNA, 36 bp, synthetic construct; identical to SEQ ID NO: 14353
  misc_feature 1..36: note = Synthetic oligonucleotide
  source 1..36: mol_type = other DNA

SEQ ID NO: 29513 - DNA, 36 bp, synthetic construct
  misc_feature 1..36: note = Synthetic oligonucleotide
  source 1..36: mol_type = other DNA
gtttgagagctttgttaattcgataggttactaaac

SEQ ID NO: 29514 - DNA, 36 bp, synthetic construct
  misc_feature 1..36: note = Synthetic oligonucleotide
  source 1..36: mol_type = other DNA
gtttgagagctttgttaattcggaaagatgtaaaac

SEQ ID NO: 29515 - DNA, 36 bp, synthetic construct; identical to SEQ ID NO: 14354
  misc_feature 1..36: note = Synthetic oligonucleotide
  source 1..36: mol_type = other DNA

SEQ ID NO: 29516 - DNA, 36 bp, synthetic construct; identical to SEQ ID NO: 14356
  misc_feature 1..36: note = Synthetic oligonucleotide
  source 1..36: mol_type = other DNA

SEQ ID NO: 29517 - DNA, 36 bp, synthetic construct; identical to SEQ ID NO: 14356
  misc_feature 1..36: note = Synthetic oligonucleotide
  source 1..36: mol_type = other DNA

SEQ ID NO: 29518 - DNA, 36 bp, synthetic construct; identical to SEQ ID NO: 14356
  misc_feature 1..36: note = Synthetic oligonucleotide
  source 1..36: mol_type = other DNA

SEQ ID NO: 29519 - DNA, 36 bp, synthetic construct
  misc_feature 1..36: note = Synthetic oligonucleotide
  source 1..36: mol_type = other DNA
gtttgagagctttgttattttgtaatattcttaaac

SEQ ID NO: 29520 - DNA, 36 bp, synthetic construct; identical to SEQ ID NO: 29519
  misc_feature 1..36: note = Synthetic oligonucleotide
  source 1..36: mol_type = other DNA

SEQ ID NO: 29521 - DNA, 36 bp, synthetic construct; identical to SEQ ID NO: 14358
  misc_feature 1..36: note = Synthetic oligonucleotide
  source 1..36: mol_type = other DNA

SEQ ID NO: 29522 - DNA, 36 bp, synthetic construct
  misc_feature 1..36: note = Synthetic oligonucleotide
  source 1..36: mol_type = other DNA
gtttgagaggtatgttgttttatagggttcttaaac

SEQ ID NO: 29523 - DNA, 36 bp, synthetic construct
  misc_feature 1..36: note = Synthetic oligonucleotide
  source 1..36: mol_type = other DNA
gtttgagaggtgtgtaattacgaagggtgttaaaac

SEQ ID NO: 29524 - DNA, 36 bp, synthetic construct; identical to SEQ ID NO: 29523
  misc_feature 1..36: note = Synthetic oligonucleotide
  source 1..36: mol_type = other DNA

SEQ ID NO: 29525 - DNA, 36 bp, synthetic construct; identical to SEQ ID NO: 14360
  misc_feature 1..36: note = Synthetic oligonucleotide
  source 1..36: mol_type = other DNA

SEQ ID NO: 29526 - DNA, 36 bp, synthetic construct
  misc_feature 1..36: note = Synthetic oligonucleotide
  source 1..36: mol_type = other DNA
gtttgagaggtgtgtaatttcgtagagtgatcaaac

SEQ ID NO: 29527 - DNA, 36 bp, synthetic construct
  misc_feature 1..36: note = Synthetic oligonucleotide
  source 1..36: mol_type = other DNA
gtttgagaggtgtgtaatttcgtagggttctttaac

SEQ ID NO: 29528 - DNA, 36 bp, synthetic construct; identical to SEQ ID NO: 14361
  misc_feature 1..36: note = Synthetic oligonucleotide
  source 1..36: mol_type = other DNA

SEQ ID NO: 29529 - DNA, 35 bp, synthetic construct
  misc_feature 1..35: note = Synthetic oligonucleotide
  source 1..35: mol_type = other DNA
gtttgagaggtgtgtagaatatgatgggtacaaaa

SEQ ID NO: 29530 - DNA, 36 bp, synthetic construct
  misc_feature 1..36: note = Synthetic oligonucleotide
  source 1..36: mol_type = other DNA
gtttgagaggtgtgtagaatatgatgggtacaaaac

SEQ ID NO: 29531 - DNA, 36 bp, synthetic construct; identical to SEQ ID NO: 29530
  misc_feature 1..36: note = Synthetic oligonucleotide
  source 1..36: mol_type = other DNA

SEQ ID NO: 29532 - DNA, 36 bp, synthetic construct; identical to SEQ ID NO: 29530
  misc_feature 1..36: note = Synthetic oligonucleotide
  source 1..36: mol_type = other DNA

SEQ ID NO: 29533 - DNA, 21 bp, synthetic construct
  misc_feature 1..21: note = Synthetic oligonucleotide
  source 1..21: mol_type = other DNA
gtttgagaggtgtgtagtttt

SEQ ID NO: 29534 - DNA, 26 bp, synthetic construct
  misc_feature 1..26: note = Synthetic oligonucleotide
  source 1..26: mol_type = other DNA
gtttgagaggtgtgtagttttatatg

SEQ ID NO: 29535 - DNA, 36 bp, synthetic construct
  misc_feature 1..36: note = Synthetic oligonucleotide
  source 1..36: mol_type = other DNA
gtttgagagtaatgcgattctaggtaacaatgagac

SEQ ID NO: 29536 - DNA, 36 bp, synthetic construct; identical to SEQ ID NO: 14363
  misc_feature 1..36: note = Synthetic oligonucleotide
  source 1..36: mol_type = other DNA

SEQ ID NO: 29537 - DNA, 36 bp, synthetic construct; identical to SEQ ID NO: 14363
  misc_feature 1..36: note = Synthetic oligonucleotide
  source 1..36: mol_type = other DNA

SEQ ID NO: 29538 - DNA, 36 bp, synthetic construct
  misc_feature 1..36: note = Synthetic oligonucleotide
  source 1..36: mol_type = other DNA
gtttgagagtaatgtaaattcatagaggtataaaac

SEQ ID NO: 29539 - DNA, 36 bp, synthetic construct; identical to SEQ ID NO: 14364
  misc_feature 1..36: note = Synthetic oligonucleotide
  source 1..36: mol_type = other DNA

SEQ ID NO: 29540 - DNA, 36 bp, synthetic construct; identical to SEQ ID NO: 14364
  misc_feature 1..36: note = Synthetic oligonucleotide
  source 1..36: mol_type = other DNA

SEQ ID NO: 29541 - DNA, 36 bp, synthetic construct; identical to SEQ ID NO: 14364
  misc_feature 1..36: note = Synthetic oligonucleotide
  source 1..36: mol_type = other DNA

SEQ ID NO: 29542 - DNA, 36 bp, synthetic construct; identical to SEQ ID NO: 14364
  misc_feature 1..36: note = Synthetic oligonucleotide
  source 1..36: mol_type = other DNA

SEQ ID NO: 29543 - DNA, 36 bp, synthetic construct
  misc_feature 1..36: note = Synthetic oligonucleotide
  source 1..36: mol_type = other DNA
gtttgagagtaatgtaattcagtagtatactcaatc

SEQ ID NO: 29544 - DNA, 36 bp, synthetic construct
  misc_feature 1..36: note = Synthetic oligonucleotide
  source 1..36: mol_type = other DNA
gtttgagagtaatgttatcttatgagtatctctaac

SEQ ID NO: 29545 - DNA, 36 bp, synthetic construct
  misc_feature 1..36: note = Synthetic oligonucleotide
  source 1..36: mol_type = other DNA
gtttgagagtaatgttattttaaatagattcaaaac

SEQ ID NO: 29546 - DNA, 36 bp, synthetic construct; identical to SEQ ID NO: 29545
  misc_feature 1..36: note = Synthetic oligonucleotide
  source 1..36: mol_type = other DNA

SEQ ID NO: 29547 - DNA, 36 bp, synthetic construct; identical to SEQ ID NO: 29545
  misc_feature 1..36: note = Synthetic oligonucleotide
  source 1..36: mol_type = other DNA

SEQ ID NO: 29548 - DNA, 36 bp, synthetic construct; identical to SEQ ID NO: 14373
  misc_feature 1..36: note = Synthetic oligonucleotide
  source 1..36: mol_type = other DNA

SEQ ID NO: 29549 - DNA, 36 bp, synthetic construct; identical to SEQ ID NO: 14373
  misc_feature 1..36: note = Synthetic oligonucleotide
  source 1..36: mol_type = other DNA

SEQ ID NO: 29550 - DNA, 36 bp, synthetic construct; identical to SEQ ID NO: 14373
  misc_feature 1..36: note = Synthetic oligonucleotide
  source 1..36: mol_type = other DNA

SEQ ID NO: 29551 - DNA, 36 bp, synthetic construct; identical to SEQ ID NO: 14373
  misc_feature 1..36: note = Synthetic oligonucleotide
  source 1..36: mol_type = other DNA

SEQ ID NO: 29552 - DNA, 35 bp, synthetic construct
  misc_feature 1..35: note = Synthetic oligonucleotide
  source 1..35: mol_type = other DNA
gtttgagagtactgttaaaacaaaaggttatcaaa

SEQ ID NO: 29553 - DNA, 35 bp, synthetic construct; identical to SEQ ID NO: 29552
  misc_feature 1..35: note = Synthetic oligonucleotide
  source 1..35: mol_type = other DNA

SEQ ID NO: 29554 - DNA, 35 bp, synthetic construct; identical to SEQ ID NO: 29552
  misc_feature 1..35: note = Synthetic oligonucleotide
  source 1..35: mol_type = other DNA

SEQ ID NO: 29555 - DNA, 35 bp, synthetic construct; identical to SEQ ID NO: 29552
  misc_feature 1..35: note = Synthetic oligonucleotide
  source 1..35: mol_type = other DNA

SEQ ID NO: 29556 - DNA, 36 bp, synthetic construct
  misc_feature 1..36: note = Synthetic oligonucleotide
  source 1..36: mol_type = other DNA
gtttgagagtactgttaaaacaaaaggttatcaaac

SEQ ID NO: 29557 - DNA, 36 bp, synthetic construct; identical to SEQ ID NO: 29556
  misc_feature 1..36: note = Synthetic oligonucleotide
  source 1..36: mol_type = other DNA

SEQ ID NO: 29558 - DNA, 36 bp, synthetic construct; identical to SEQ ID NO: 29556
  misc_feature 1..36: note = Synthetic oligonucleotide
  source 1..36: mol_type = other DNA

SEQ ID NO: 29559 - DNA, 36 bp, synthetic construct; identical to SEQ ID NO: 29556
  misc_feature 1..36: note = Synthetic oligonucleotide
  source 1..36: mol_type = other DNA

SEQ ID NO: 29560 - DNA, 36 bp, synthetic construct; identical to SEQ ID NO: 29556
  misc_feature 1..36: note = Synthetic oligonucleotide
  source 1..36: mol_type = other DNA

SEQ ID NO: 29561 - DNA, 36 bp, synthetic construct
  misc_feature 1..36: note = Synthetic oligonucleotide
  source 1..36: mol_type = other DNA
gtttgagagtactgttaaaacaaaaggttatcaaat

SEQ ID NO: 29562 - DNA, 36 bp, synthetic construct
  misc_feature 1..36: note = Synthetic oligonucleotide
  source 1..36: mol_type = other DNA
gtttgagagtactgttaatttatacactatcaaact

SEQ ID NO: 29563 - DNA, 36 bp, synthetic construct
  misc_feature 1..36: note = Synthetic oligonucleotide
  source 1..36: mol_type = other DNA
gtttgagagtagtgcaatcctaagtggtagtaaaac

SEQ ID NO: 29564 - DNA, 36 bp, synthetic construct; identical to SEQ ID NO: 29563
  misc_feature 1..36: note = Synthetic oligonucleotide
  source 1..36: mol_type = other DNA

SEQ ID NO: 29565 - DNA, 37 bp, synthetic construct
  misc_feature 1..37: note = Synthetic oligonucleotide
  source 1..37: mol_type = other DNA
gtttgagagtagtgcagttttatagggggctcaaaca

SEQ ID NO: 29566 - DNA, 36 bp, synthetic construct
  misc_feature 1..36: note = Synthetic oligonucleotide
  source 1..36: mol_type = other DNA
gtttgagagtagtgtaaaactagtttggtctccaat

SEQ ID NO: 29567 - DNA, 36 bp, synthetic construct
  misc_feature 1..36: note = Synthetic oligonucleotide
  source 1..36: mol_type = other DNA
gtttgagagtagtgtaaaatcatagttgagtgaaac

SEQ ID NO: 29568 - DNA, 36 bp, synthetic construct; identical to SEQ ID NO: 14377
  misc_feature 1..36: note = Synthetic oligonucleotide
  source 1..36: mol_type = other DNA

SEQ ID NO: 29569 - DNA, 36 bp, synthetic construct; identical to SEQ ID NO: 14379
  misc_feature 1..36: note = Synthetic oligonucleotide
  source 1..36: mol_type = other DNA

SEQ ID NO: 29570 - DNA, 36 bp, synthetic construct; identical to SEQ ID NO: 14379
  misc_feature 1..36: note = Synthetic oligonucleotide
  source 1..36: mol_type = other DNA

SEQ ID NO: 29571 - DNA, 36 bp, synthetic construct
  misc_feature 1..36: note = Synthetic oligonucleotide
  source 1..36: mol_type = other DNA
gtttgagagtagtgtaaatcttaatggtacttaaac

SEQ ID NO: 29572 - DNA, 36 bp, synthetic construct
  misc_feature 1..36: note = Synthetic oligonucleotide
  source 1..36: mol_type = other DNA
gtttgagagtagtgtaaattcagaatacagtaaaac

SEQ ID NO: 29573 - DNA, 36 bp, synthetic construct; identical to SEQ ID NO: 29572
  misc_feature 1..36: note = Synthetic oligonucleotide
  source 1..36: mol_type = other DNA

SEQ ID NO: 29574 - DNA, 35 bp, synthetic construct
  misc_feature 1..35: note = Synthetic oligonucleotide
  source 1..35: mol_type = other DNA
gtttgagagtagtgtaaattcagatggtactcaaa

SEQ ID NO: 29575 - DNA, 36 bp, synthetic construct; identical to SEQ ID NO: 14383
  misc_feature 1..36: note = Synthetic oligonucleotide
  source 1..36: mol_type = other DNA

SEQ ID NO: 29576 - DNA, 36 bp, synthetic construct; identical to SEQ ID NO: 14383
  misc_feature 1..36: note = Synthetic oligonucleotide
  source 1..36: mol_type = other DNA

SEQ ID NO: 29577 - DNA, 36 bp, synthetic construct; identical to SEQ ID NO: 14384
  misc_feature 1..36: note = Synthetic oligonucleotide
  source 1..36: mol_type = other DNA

SEQ ID NO: 29578 - DNA, 36 bp, synthetic construct; identical to SEQ ID NO: 14384
  misc_feature 1..36: note = Synthetic oligonucleotide
  source 1..36: mol_type = other DNA

SEQ ID NO: 29579 - DNA, 36 bp, synthetic construct
  misc_feature 1..36: note = Synthetic oligonucleotide
  source 1..36: mol_type = other DNA
gtttgagagtagtgtaaattcataaggtactaaaac

SEQ ID NO: 29580 - DNA, 36 bp, synthetic construct
  misc_feature 1..36: note = Synthetic oligonucleotide
  source 1..36: mol_type = other DNA
gtttgagagtagtgtaaattcataaggtagtaaaac

SEQ ID NO: 29581 - DNA, 36 bp, synthetic construct; identical to SEQ ID NO: 29580
  misc_feature 1..36: note = Synthetic oligonucleotide
  source 1..36: mol_type = other DNA

SEQ ID NO: 29582 - DNA, 36 bp, synthetic construct; identical to SEQ ID NO: 29580
  misc_feature 1..36: note = Synthetic oligonucleotide
  source 1..36: mol_type = other DNA

SEQ ID NO: 29583 - DNA, 36 bp, synthetic construct; identical to SEQ ID NO: 14385
  misc_feature 1..36: note = Synthetic oligonucleotide
  source 1..36: mol_type = other DNA

SEQ ID NO: 29584 - DNA, 36 bp, synthetic construct; identical to SEQ ID NO: 14385
  misc_feature 1..36: note = Synthetic oligonucleotide
  source 1..36: mol_type = other DNA

SEQ ID NO: 29585 - DNA, 36 bp, synthetic construct; identical to SEQ ID NO: 14385
  misc_feature 1..36: note = Synthetic oligonucleotide
  source 1..36: mol_type = other DNA

SEQ ID NO: 29586 - DNA, 36 bp, synthetic construct; identical to SEQ ID NO: 14385
  misc_feature 1..36: note = Synthetic oligonucleotide
  source 1..36: mol_type = other DNA

SEQ ID NO: 29587 - DNA, 36 bp, synthetic construct; identical to SEQ ID NO: 14385
  misc_feature 1..36: note = Synthetic oligonucleotide
  source 1..36: mol_type = other DNA

SEQ ID NO: 29588 - DNA, 36 bp, synthetic construct; identical to SEQ ID NO: 14385
  misc_feature 1..36: note = Synthetic oligonucleotide
  source 1..36: mol_type = other DNA

SEQ ID NO: 29589 - DNA, 36 bp, synthetic construct; identical to SEQ ID NO: 14385
  misc_feature 1..36: note = Synthetic oligonucleotide
  source 1..36: mol_type = other DNA

SEQ ID NO: 29590 - DNA, 36 bp, synthetic construct; identical to SEQ ID NO: 14385
  misc_feature 1..36: note = Synthetic oligonucleotide
  source 1..36: mol_type = other DNA

SEQ ID NO: 29591 - DNA, 30 bp, synthetic construct
  misc_feature 1..30: note = Synthetic oligonucleotide
  source 1..30: mol_type = other DNA
gtttgagagtagtgtaaattcatatggtag

SEQ ID NO: 29592 - DNA, 36 bp, synthetic construct
  misc_feature 1..36: note = Synthetic oligonucleotide
  source 1..36: mol_type = other DNA
gtttgagagtagtgtaaattcatatggtagaaaaac

SEQ ID NO: 29593 - DNA, 36 bp, synthetic construct; identical to SEQ ID NO: 29592
  misc_feature 1..36: note = Synthetic oligonucleotide
  source 1..36: mol_type = other DNA

SEQ ID NO: 29594 - DNA, 36 bp, synthetic construct; identical to SEQ ID NO: 29592
  misc_feature 1..36: note = Synthetic oligonucleotide
  source 1..36: mol_type = other DNA

SEQ ID NO: 29595 - DNA, 36 bp, synthetic construct; identical to SEQ ID NO: 29592
  misc_feature 1..36: note = Synthetic oligonucleotide
  source 1..36: mol_type = other DNA

SEQ ID NO: 29596 - DNA, 36 bp, synthetic construct; identical to SEQ ID NO: 29592
  misc_feature 1..36: note = Synthetic oligonucleotide
  source 1..36: mol_type = other DNA

SEQ ID NO: 29597 - DNA, 36 bp, synthetic construct
  misc_feature 1..36: note = Synthetic oligonucleotide
  source 1..36: mol_type = other DNA
gtttgagagtagtgtaaatttataggggactaaaac

SEQ ID NO: 29598 - DNA, 36 bp, synthetic construct; identical to SEQ ID NO: 29597
  misc_feature 1..36: note = Synthetic oligonucleotide
  source 1..36: mol_type = other DNA

SEQ ID NO: 29599 - DNA, 36 bp, synthetic construct; identical to SEQ ID NO: 14387
  misc_feature 1..36: note = Synthetic oligonucleotide
  source 1..36: mol_type = other DNA

SEQ ID NO: 29600 - DNA, 36 bp, synthetic construct; identical to SEQ ID NO: 14387
  misc_feature 1..36: note = Synthetic oligonucleotide
  source 1..36: mol_type = other DNA

SEQ ID NO: 29601 - DNA, 36 bp, synthetic construct; identical to SEQ ID NO: 14387
  misc_feature 1..36: note = Synthetic oligonucleotide
  source 1..36: mol_type = other DNA

SEQ ID NO: 29602 - DNA, 36 bp, synthetic construct; identical to SEQ ID NO: 14387
  misc_feature 1..36: note = Synthetic oligonucleotide
  source 1..36: mol_type = other DNA

SEQ ID NO: 29603 - DNA, 36 bp, synthetic construct; identical to SEQ ID NO: 14387
  misc_feature 1..36: note = Synthetic oligonucleotide
  source 1..36: mol_type = other DNA

SEQ ID NO: 29604 - DNA, 36 bp, synthetic construct; identical to SEQ ID NO: 14387
  misc_feature 1..36: note = Synthetic oligonucleotide
  source 1..36: mol_type = other DNA

SEQ ID NO: 29605 - DNA, 36 bp, synthetic construct; identical to SEQ ID NO: 14387
  misc_feature 1..36: note = Synthetic oligonucleotide
  source 1..36: mol_type = other DNA

SEQ ID NO: 29606 - DNA, 36 bp, synthetic construct; identical to SEQ ID NO: 14387
  misc_feature 1..36: note = Synthetic oligonucleotide
  source 1..36: mol_type = other DNA

SEQ ID NO: 29607 - DNA, 36 bp, synthetic construct; identical to SEQ ID NO: 14387
  misc_feature 1..36: note = Synthetic oligonucleotide
  source 1..36: mol_type = other DNA

SEQ ID NO: 29608 - DNA, 36 bp, synthetic construct; identical to SEQ ID NO: 14387
  misc_feature 1..36: note = Synthetic oligonucleotide
  source 1..36: mol_type = other DNA

SEQ ID NO: 29609 - DNA, 36 bp, synthetic construct; identical to SEQ ID NO: 14387
  misc_feature 1..36: note = Synthetic oligonucleotide
  source 1..36: mol_type = other DNA

SEQ ID NO: 29610 - DNA, 36 bp, synthetic construct; identical to SEQ ID NO: 14390
  misc_feature 1..36: note = Synthetic oligonucleotide
  source 1..36: mol_type = other DNA

SEQ ID NO: 29611 - DNA, 36 bp, synthetic construct; identical to SEQ ID NO: 14390
  misc_feature 1..36: note = Synthetic oligonucleotide
  source 1..36: mol_type = other DNA

SEQ ID NO: 29612 - DNA, 36 bp, synthetic construct; identical to SEQ ID NO: 14390
  misc_feature 1..36: note = Synthetic oligonucleotide
  source 1..36: mol_type = other DNA

SEQ ID NO: 29613 - DNA, 36 bp, synthetic construct; identical to SEQ ID NO: 14390
  misc_feature 1..36: note = Synthetic oligonucleotide
  source 1..36: mol_type = other DNA

SEQ ID NO: 29614 - DNA, 36 bp, synthetic construct; identical to SEQ ID NO: 14390
  misc_feature 1..36: note = Synthetic oligonucleotide
  source 1..36: mol_type = other DNA

SEQ ID NO: 29615 - DNA, 36 bp, synthetic construct; identical to SEQ ID NO: 14390
  misc_feature 1..36: note = Synthetic oligonucleotide
  source 1..36: mol_type = other DNA

SEQ ID NO: 29616 - DNA, 36 bp, synthetic construct; identical to SEQ ID NO: 14390
  misc_feature 1..36: note = Synthetic oligonucleotide
  source 1..36: mol_type = other DNA

SEQ ID NO: 29617 - DNA, 36 bp, synthetic construct; identical to SEQ ID NO: 14390
  misc_feature 1..36: note = Synthetic oligonucleotide
  source 1..36: mol_type = other DNA

SEQ ID NO: 29618 - DNA, 36 bp, synthetic construct; identical to SEQ ID NO: 14390
  misc_feature 1..36: note = Synthetic oligonucleotide
  source 1..36: mol_type = other DNA

SEQ ID NO: 29619 - DNA, 36 bp, synthetic construct; identical to SEQ ID NO: 14390
  misc_feature 1..36: note = Synthetic oligonucleotide
  source 1..36: mol_type = other DNA

SEQ ID NO: 29620 - DNA, 36 bp, synthetic construct
  misc_feature 1..36: note = Synthetic oligonucleotide
  source 1..36: mol_type = other DNA
gtttgagagtagtgtaatcctaagtggtagtcaaac

SEQ ID NO: 29621 - DNA, 36 bp, synthetic construct; identical to SEQ ID NO: 14391
  misc_feature 1..36: note = Synthetic oligonucleotide
  source 1..36: mol_type = other DNA

SEQ ID NO: 29622 - DNA, 36 bp, synthetic construct; identical to SEQ ID NO: 14392
  misc_feature 1..36: note = Synthetic oligonucleotide
  source 1..36: mol_type = other DNA

SEQ ID NO: 29623 - DNA, 36 bp, synthetic construct; identical to SEQ ID NO: 14392
  misc_feature 1..36: note = Synthetic oligonucleotide
  source 1..36: mol_type = other DNA

SEQ ID NO: 29624 - DNA, 36 bp, synthetic construct
  misc_feature 1..36: note = Synthetic oligonucleotide
  source 1..36: mol_type = other DNA
gtttgagagtagtgtaattccaaatccccccaaacc

SEQ ID NO: 29625 - DNA, 36 bp, synthetic construct
  misc_feature 1..36: note = Synthetic oligonucleotide
  source 1..36: mol_type = other DNA
gtttgagagtagtgtaattcctaatggtagtaaaac

SEQ ID NO: 29626 - DNA, 21 bp, synthetic construct
  misc_feature 1..21: note = Synthetic oligonucleotide
  source 1..21: mol_type = other DNA
gtttgagagtagtgtaattct

SEQ ID NO: 29627 - DNA, 36 bp, synthetic construct
  misc_feature 1..36: note = Synthetic oligonucleotide
  source 1..36: mol_type = other DNA
gtttgagagtagtgtaattctaaatggtagtcaaac

SEQ ID NO: 29628 - DNA, 36 bp, synthetic construct; identical to SEQ ID NO: 14398
  misc_feature 1..36: note = Synthetic oligonucleotide
  source 1..36: mol_type = other DNA

SEQ ID NO: 29629 - DNA, 36 bp, synthetic construct; identical to SEQ ID NO: 14398
  misc_feature 1..36: note = Synthetic oligonucleotide
  source 1..36: mol_type = other DNA

SEQ ID NO: 29630 - DNA, 36 bp, synthetic construct; identical to SEQ ID NO: 14398
  misc_feature 1..36: note = Synthetic oligonucleotide
  source 1..36: mol_type = other DNA

SEQ ID NO: 29631 - DNA, 36 bp, synthetic construct; identical to SEQ ID NO: 14398
  misc_feature 1..36: note = Synthetic oligonucleotide
  source 1..36: mol_type = other DNA

SEQ ID NO: 29632 - DNA, 36 bp, synthetic construct; identical to SEQ ID NO: 14399
  misc_feature 1..36: note = Synthetic oligonucleotide
  source 1..36: mol_type = other DNA

SEQ ID NO: 29633 - DNA, 36 bp, synthetic construct; identical to SEQ ID NO: 14400
  misc_feature 1..36: note = Synthetic oligonucleotide
  source 1..36: mol_type = other DNA

SEQ ID NO: 29634 - DNA, 36 bp, synthetic construct; identical to SEQ ID NO: 14400
  misc_feature 1..36: note = Synthetic oligonucleotide
  source 1..36: mol_type = other DNA

SEQ ID NO: 29635 - DNA, 26 bp, synthetic construct
  misc_feature 1..26: note = Synthetic oligonucleotide
  source 1..26: mol_type = other DNA
gtttgagagtagtgtaattctgtaaa

SEQ ID NO: 29636 - DNA, 26 bp, synthetic construct
  misc_feature 1..26: note = Synthetic oligonucleotide
  source 1..26: mol_type = other DNA
gtttgagagtagtgtaattctgtaaa

SEQ ID NO: 29637 - DNA, 36 bp, synthetic construct; identical to SEQ ID NO: 14402
  misc_feature 1..36: note = Synthetic oligonucleotide
  source 1..36: mol_type = other DNA

SEQ ID NO: 29638 - DNA, 36 bp, synthetic construct; identical to SEQ ID NO: 14402
  misc_feature 1..36: note = Synthetic oligonucleotide
  source 1..36: mol_type = other DNA

SEQ ID NO: 29639 - DNA, 36 bp, synthetic construct; identical to SEQ ID NO: 14402
  misc_feature 1..36: note = Synthetic oligonucleotide
  source 1..36: mol_type = other DNA

SEQ ID NO: 29640 - DNA, 36 bp, synthetic construct; identical to SEQ ID NO: 14402
  misc_feature 1..36: note = Synthetic oligonucleotide
  source 1..36: mol_type = other DNA

SEQ ID NO: 29641 - DNA, 36 bp, synthetic construct; identical to SEQ ID NO: 14402
  misc_feature 1..36: note = Synthetic oligonucleotide
  source 1..36: mol_type = other DNA

SEQ ID NO: 29642 - DNA, 36 bp, synthetic construct; identical to SEQ ID NO: 14402
  misc_feature 1..36: note = Synthetic oligonucleotide
  source 1..36: mol_type = other DNA

SEQ ID NO: 29643 - DNA, 36 bp, synthetic construct; identical to SEQ ID NO: 14402
  misc_feature 1..36: note = Synthetic oligonucleotide
  source 1..36: mol_type = other DNA

SEQ ID NO: 29644 - DNA, 36 bp, synthetic construct; identical to SEQ ID NO: 14402
  misc_feature 1..36: note = Synthetic oligonucleotide
  source 1..36: mol_type = other DNA

SEQ ID NO: 29645 - DNA, 36 bp, synthetic construct; identical to SEQ ID NO: 14402
  misc_feature 1..36: note = Synthetic oligonucleotide
  source 1..36: mol_type = other DNA

SEQ ID NO: 29646 - DNA, 36 bp, synthetic construct; identical to SEQ ID NO: 14402
  misc_feature 1..36: note = Synthetic oligonucleotide
  source 1..36: mol_type = other DNA

SEQ ID NO: 29647 - DNA, 36 bp, synthetic construct; identical to SEQ ID NO: 14402
  misc_feature 1..36: note = Synthetic oligonucleotide
  source 1..36: mol_type = other DNA

SEQ ID NO: 29648 - DNA, 36 bp, synthetic construct; identical to SEQ ID NO: 14402
  misc_feature 1..36: note = Synthetic oligonucleotide
  source 1..36: mol_type = other DNA

SEQ ID NO: 29649 - DNA, 36 bp, synthetic construct; identical to SEQ ID NO: 14402
  misc_feature 1..36: note = Synthetic oligonucleotide
  source 1..36: mol_type = other DNA

SEQ ID NO: 29650 - DNA, 36 bp, synthetic construct; identical to SEQ ID NO: 14402
  misc_feature 1..36: note = Synthetic oligonucleotide
  source 1..36: mol_type = other DNA

SEQ ID NO: 29651 - DNA, 36 bp, synthetic construct; identical to SEQ ID NO: 14402
  misc_feature 1..36: note = Synthetic oligonucleotide
  source 1..36: mol_type = other DNA

SEQ ID NO: 29652 - DNA, 36 bp, synthetic construct; identical to SEQ ID NO: 14402
  misc_feature 1..36: note = Synthetic oligonucleotide
  source 1..36: mol_type = other DNA

SEQ ID NO: 29653 - DNA, 36 bp, synthetic construct; identical to SEQ ID NO: 14402
  misc_feature 1..36: note = Synthetic oligonucleotide
  source 1..36: mol_type = other DNA

SEQ ID NO: 29654 - DNA, 36 bp, synthetic construct; identical to SEQ ID NO: 14402
  misc_feature 1..36: note = Synthetic oligonucleotide
  source 1..36: mol_type = other DNA

SEQ ID NO: 29655 - DNA, 36 bp, synthetic construct; identical to SEQ ID NO: 14403
  misc_feature 1..36: note = Synthetic oligonucleotide
  source 1..36: mol_type = other DNA

SEQ ID NO: 29656 - DNA, 36 bp, synthetic construct; identical to SEQ ID NO: 14403
  misc_feature 1..36: note = Synthetic oligonucleotide
  source 1..36: mol_type = other DNA

SEQ ID NO: 29657 - DNA, 36 bp, synthetic construct; identical to SEQ ID NO: 14403
  misc_feature 1..36: note = Synthetic oligonucleotide
  source 1..36: mol_type = other DNA

SEQ ID NO: 29658 - DNA, 36 bp, synthetic construct; identical to SEQ ID NO: 14403
  misc_feature 1..36: note = Synthetic oligonucleotide
  source 1..36: mol_type = other DNA

SEQ ID NO: 29659 - DNA, 36 bp, synthetic construct; identical to SEQ ID NO: 14403
  misc_feature 1..36: note = Synthetic oligonucleotide
  source 1..36: mol_type = other DNA

SEQ ID NO: 29660 - DNA, 36 bp, synthetic construct; identical to SEQ ID NO: 14403
  misc_feature 1..36: note = Synthetic oligonucleotide
  source 1..36: mol_type = other DNA

SEQ ID NO: 29661 - DNA, 36 bp, synthetic construct; identical to SEQ ID NO: 14403
  misc_feature 1..36: note = Synthetic oligonucleotide
  source 1..36: mol_type = other DNA

SEQ ID NO: 29662 - DNA, 36 bp, synthetic construct; identical to SEQ ID NO: 14403
  misc_feature 1..36: note = Synthetic oligonucleotide
  source 1..36: mol_type = other DNA

SEQ ID NO: 29663 - DNA, 36 bp, synthetic construct; identical to SEQ ID NO: 14403
  misc_feature 1..36: note = Synthetic oligonucleotide
  source 1..36: mol_type = other DNA

SEQ ID NO: 29664 - DNA, 36 bp, synthetic construct; identical to SEQ ID NO: 14403
  misc_feature 1..36: note = Synthetic oligonucleotide
  source 1..36: mol_type = other DNA

SEQ ID NO: 29665 - DNA, 36 bp, synthetic construct; identical to SEQ ID NO: 14403
  misc_feature 1..36: note = Synthetic oligonucleotide
  source 1..36: mol_type = other DNA

SEQ ID NO: 29666 - DNA, 36 bp, synthetic construct; identical to SEQ ID NO: 14403
  misc_feature 1..36: note = Synthetic oligonucleotide
  source 1..36: mol_type = other DNA

SEQ ID NO: 29667 - DNA, 36 bp, synthetic construct
  misc_feature 1..36: note = Synthetic oligonucleotide
  source 1..36: mol_type = other DNA
gtttgagagtagtgtaattctgtaaatctttaaaac

SEQ ID NO: 29668 - DNA, 36 bp, synthetic construct
  misc_feature 1..36: note = Synthetic oligonucleotide
  source 1..36: mol_type = other DNA
gtttgagagtagtgtaattctgtaaatgtctcaaac

SEQ ID NO: 29669 - DNA, 36 bp, synthetic construct; identical to SEQ ID NO: 14404
  misc_feature 1..36: note = Synthetic oligonucleotide
  source 1..36: mol_type = other DNA

SEQ ID NO: 29670 - DNA, 36 bp, synthetic construct; identical to SEQ ID NO: 14404
  misc_feature 1..36: note = Synthetic oligonucleotide
  source 1..36: mol_type = other DNA

SEQ ID NO: 29671 - DNA, 20 bp, synthetic construct
  misc_feature 1..20: note = Synthetic oligonucleotide
  source 1..20: mol_type = other DNA
gtttgagagtagtgtaattt

SEQ ID NO: 29672 - DNA, 36 bp, synthetic construct; identical to SEQ ID NO: 14405
  misc_feature 1..36: note = Synthetic oligonucleotide
  source 1..36: mol_type = other DNA

SEQ ID NO: 29673 - DNA, 36 bp, synthetic construct
  misc_feature 1..36: note = Synthetic oligonucleotide
  source 1..36: mol_type = other DNA
gtttgagagtagtgtaatttaataagggactaaaac

SEQ ID NO: 29674 - DNA, 36 bp, synthetic construct
  misc_feature 1..36: note = Synthetic oligonucleotide
  source 1..36: mol_type = other DNA
gtttgagagtagtgtaatttaataagggactcaaac

SEQ ID NO: 29675 - DNA, 36 bp, synthetic construct; identical to SEQ ID NO: 14406
  misc_feature 1..36: note = Synthetic oligonucleotide
  source 1..36: mol_type = other DNA

SEQ ID NO: 29676 - DNA, 36 bp, synthetic construct
  misc_feature 1..36: note = Synthetic oligonucleotide
  source 1..36: mol_type = other DNA
gtttgagagtagtgtaatttcagagatgtcttaaac

SEQ ID NO: 29677 - DNA, 36 bp, synthetic construct; identical to SEQ ID NO: 29676
  misc_feature 1..36: note = Synthetic oligonucleotide
  source 1..36: mol_type = other DNA

SEQ ID NO: 29678 - DNA, 36 bp, synthetic construct
  misc_feature 1..36: note = Synthetic oligonucleotide
  source 1..36: mol_type = other DNA
gtttgagagtagtgtaatttcagagtggtcttaatc

SEQ ID NO: 29679 - DNA, 36 bp, synthetic construct
  misc_feature 1..36: note = Synthetic oligonucleotide
  source 1..36: mol_type = other DNA
gtttgagagtagtgtaatttcataaggaagtaaaac

SEQ ID NO: 29680 - DNA, 36 bp, synthetic construct
  misc_feature 1..36: note = Synthetic oligonucleotide
  source 1..36: mol_type = other DNA
gtttgagagtagtgtaatttcataaggtaatcaaac

SEQ ID NO: 29681 - DNA, 36 bp, synthetic construct; identical to SEQ ID NO: 29680
  misc_feature 1..36: note = Synthetic oligonucleotide
  source 1..36: mol_type = other DNA

SEQ ID NO: 29682 - DNA, 35 bp, synthetic construct
  misc_feature 1..35: note = Synthetic oligonucleotide
  source 1..35: mol_type = other DNA
gtttgagagtagtgtaatttcataaggtactgaaa

SEQ ID NO: 29683 - DNA, 36 bp, synthetic construct; identical to SEQ ID NO: 14409
  misc_feature 1..36: note = Synthetic oligonucleotide
  source 1..36: mol_type = other DNA

SEQ ID NO: 29684 - DNA, 36 bp, synthetic construct; identical to SEQ ID NO: 14409
  misc_feature 1..36: note = Synthetic oligonucleotide
  source 1..36: mol_type = other DNA

SEQ ID NO: 29685 - DNA, 36 bp, synthetic construct; identical to SEQ ID NO: 14409
  misc_feature 1..36: note = Synthetic oligonucleotide
  source 1..36: mol_type = other DNA

SEQ ID NO: 29686 - DNA, 36 bp, synthetic construct; identical to SEQ ID NO: 14409
  misc_feature 1..36: note = Synthetic oligonucleotide
  source 1..36: mol_type = other DNA

SEQ ID NO: 29687 - DNA, 36 bp, synthetic construct; identical to SEQ ID NO: 14409
  misc_feature 1..36: note = Synthetic oligonucleotide
  source 1..36: mol_type = other DNA

SEQ ID NO: 29688 - DNA, 36 bp, synthetic construct; identical to SEQ ID NO: 14409
  misc_feature 1..36: note = Synthetic oligonucleotide
  source 1..36: mol_type = other DNA

SEQ ID NO: 29689 - DNA, 36 bp, synthetic construct; identical to SEQ ID NO: 14409
  misc_feature 1..36: note = Synthetic oligonucleotide
  source 1..36: mol_type = other DNA

SEQ ID NO: 29690 - DNA, 36 bp, synthetic construct; identical to SEQ ID NO: 14409
  misc_feature 1..36: note = Synthetic oligonucleotide
  source 1..36: mol_type = other DNA

SEQ ID NO: 29691 - DNA, 36 bp, synthetic construct; identical to SEQ ID NO: 14409
  misc_feature 1..36: note = Synthetic oligonucleotide
  source 1..36: mol_type = other DNA

SEQ ID NO: 29692 - DNA, 36 bp, synthetic construct; identical to SEQ ID NO: 14409
  misc_feature 1..36: note = Synthetic oligonucleotide
  source 1..36: mol_type = other DNA

SEQ ID NO: 29693 - DNA, 36 bp, synthetic construct; identical to SEQ ID NO: 14409
  misc_feature 1..36: note = Synthetic oligonucleotide
  source 1..36: mol_type = other DNA

SEQ ID NO: 29694 - DNA, 36 bp, synthetic construct; identical to SEQ ID NO: 14409
  misc_feature 1..36: note = Synthetic oligonucleotide
  source 1..36: mol_type = other DNA

SEQ ID NO: 29695 - DNA, 36 bp, synthetic construct; identical to SEQ ID NO: 14409
  misc_feature 1..36: note = Synthetic oligonucleotide
  source 1..36: mol_type = other DNA

SEQ ID NO: 29696 - DNA, 36 bp, synthetic construct; identical to SEQ ID NO: 14409
  misc_feature 1..36: note = Synthetic oligonucleotide
  source 1..36: mol_type = other DNA

SEQ ID NO: 29697 - DNA, 36 bp, synthetic construct; identical to SEQ ID NO: 14409
  misc_feature 1..36: note = Synthetic oligonucleotide
  source 1..36: mol_type = other DNA

SEQ ID NO: 29698 - DNA, 36 bp, synthetic construct; identical to SEQ ID NO: 14409
  misc_feature 1..36: note = Synthetic oligonucleotide
  source 1..36: mol_type = other DNA

SEQ ID NO: 29699 - DNA, 36 bp, synthetic construct; identical to SEQ ID NO: 14409
  misc_feature 1..36: note = Synthetic oligonucleotide
  source 1..36: mol_type = other DNA

SEQ ID NO: 29700 - DNA, 36 bp, synthetic construct; identical to SEQ ID NO: 14409
  misc_feature 1..36: note = Synthetic oligonucleotide
  source 1..36: mol_type = other DNA

SEQ ID NO: 29701 - DNA, 36 bp, synthetic construct; identical to SEQ ID NO: 14409
  misc_feature 1..36: note = Synthetic oligonucleotide
  source 1..36: mol_type = other DNA

SEQ ID NO: 29702 - DNA, 36 bp, synthetic construct; identical to SEQ ID NO: 14409
  misc_feature 1..36: note = Synthetic oligonucleotide
  source 1..36: mol_type = other DNA

SEQ ID NO: 29703 - DNA, 36 bp, synthetic construct; identical to SEQ ID NO: 14409
  misc_feature 1..36: note = Synthetic oligonucleotide
  source 1..36: mol_type = other DNA

SEQ ID NO: 29704 - DNA, 36 bp, synthetic construct; identical to SEQ ID NO: 14409
  misc_feature 1..36: note = Synthetic oligonucleotide
  source 1..36: mol_type = other DNA

SEQ ID NO: 29705 - DNA, 36 bp, synthetic construct; identical to SEQ ID NO: 14409
  misc_feature 1..36: note = Synthetic oligonucleotide
  source 1..36: mol_type = other DNA

SEQ ID NO: 29706 - DNA, 36 bp, synthetic construct; identical to SEQ ID NO: 14409
  misc_feature 1..36: note = Synthetic oligonucleotide
  source 1..36: mol_type = other DNA

SEQ ID NO: 29707 - DNA, 36 bp, synthetic construct; identical to SEQ ID NO: 14409
  misc_feature 1..36: note = Synthetic oligonucleotide
  source 1..36: mol_type = other DNA

SEQ ID NO: 29708 - DNA, 36 bp, synthetic construct; identical to SEQ ID NO: 14409
  misc_feature 1..36: note = Synthetic oligonucleotide
  source 1..36: mol_type = other DNA

SEQ ID NO: 29709 - DNA, 36 bp, synthetic construct; identical to SEQ ID NO: 14409
  misc_feature 1..36: note = Synthetic oligonucleotide
  source 1..36: mol_type = other DNA

SEQ ID NO: 29710 - DNA, 36 bp, synthetic construct; identical to SEQ ID NO: 14409
  misc_feature 1..36: note = Synthetic oligonucleotide
  source 1..36: mol_type = other DNA

SEQ ID NO: 29711 - DNA, 36 bp, synthetic construct; identical to SEQ ID NO: 14409
  misc_feature 1..36: note = Synthetic oligonucleotide
  source 1..36: mol_type = other DNA

SEQ ID NO: 29712 - DNA, 36 bp, synthetic construct; identical to SEQ ID NO: 14409
  misc_feature 1..36: note = Synthetic oligonucleotide
  source 1..36: mol_type = other DNA

SEQ ID NO: 29713 - DNA, 36 bp, synthetic construct; identical to SEQ ID NO: 14409
  misc_feature 1..36: note = Synthetic oligonucleotide
  source 1..36: mol_type = other DNA

SEQ ID NO: 29714 - DNA, 36 bp, synthetic construct
  misc_feature 1..36: note = Synthetic oligonucleotide
  source 1..36: mol_type = other DNA
gtttgagagtagtgtaatttcataaggtactgaaat

SEQ ID NO: 29715 - DNA, 36 bp, synthetic construct
  misc_feature 1..36: note = Synthetic oligonucleotide
  source 1..36: mol_type = other DNA
gtttgagagtagtgtaatttcataaggtagtaaaac

SEQ ID NO: 29716 - DNA, 36 bp, synthetic construct; identical to SEQ ID NO: 29715
  misc_feature 1..36: note = Synthetic oligonucleotide
  source 1..36: mol_type = other DNA

SEQ ID NO: 29717 - DNA, 36 bp, synthetic construct; identical to SEQ ID NO: 29715
  misc_feature 1..36: note = Synthetic oligonucleotide
  source 1..36: mol_type = other DNA

SEQ ID NO: 29718 - DNA, 36 bp, synthetic construct; identical to SEQ ID NO: 29715
  misc_feature 1..36: note = Synthetic oligonucleotide
  source 1..36: mol_type = other DNA

SEQ ID NO: 29719 - DNA, 36 bp, synthetic construct; identical to SEQ ID NO: 29715
  misc_feature 1..36: note = Synthetic oligonucleotide
  source 1..36: mol_type = other DNA

SEQ ID NO: 29720 - DNA, 36 bp, synthetic construct; identical to SEQ ID NO: 29715
  misc_feature 1..36: note = Synthetic oligonucleotide
  source 1..36: mol_type = other DNA

SEQ ID NO: 29721 - DNA, 36 bp, synthetic construct; identical to SEQ ID NO: 29715
  misc_feature 1..36: note = Synthetic oligonucleotide
  source 1..36: mol_type = other DNA

SEQ ID NO: 29722 - DNA, 36 bp, synthetic construct
  misc_feature 1..36: note = Synthetic oligonucleotide
  source 1..36: mol_type = other DNA
gtttgagagtagtgtaatttcataaggtattaaaac

SEQ ID NO: 29723 - DNA, 36 bp, synthetic construct; identical to SEQ ID NO: 29722
  misc_feature 1..36: note = Synthetic oligonucleotide
  source 1..36: mol_type = other DNA

SEQ ID NO: 29724 - DNA, 36 bp, synthetic construct; identical to SEQ ID NO: 29722
  misc_feature 1..36: note = Synthetic oligonucleotide
  source 1..36: mol_type = other DNA

SEQ ID NO: 29725 - DNA, 32 bp, synthetic construct
  misc_feature 1..32: note = Synthetic oligonucleotide
  source 1..32: mol_type = other DNA
gtttgagagtagtgtaatttcatatggtaatc

SEQ ID NO: 29726 - DNA, 32 bp, synthetic construct; identical to SEQ ID NO: 29725
  misc_feature 1..32: note = Synthetic oligonucleotide
  source 1..32: mol_type = other DNA

SEQ ID NO: 29727 - DNA, 36 bp, synthetic construct; identical to SEQ ID NO: 14414
  misc_feature 1..36: note = Synthetic oligonucleotide
  source 1..36: mol_type = other DNA

SEQ ID NO: 29728 - DNA, 36 bp, synthetic construct; identical to SEQ ID NO: 14414
  misc_feature 1..36: note = Synthetic oligonucleotide
  source 1..36: mol_type = other DNA

SEQ ID NO: 29729 - DNA, 36 bp, synthetic construct; identical to SEQ ID NO: 14414
  misc_feature 1..36: note = Synthetic oligonucleotide
  source 1..36: mol_type = other DNA

SEQ ID NO: 29730 - DNA, 36 bp, synthetic construct; identical to SEQ ID NO: 14414
  misc_feature 1..36: note = Synthetic oligonucleotide
  source 1..36: mol_type = other DNA

SEQ ID NO: 29731 - DNA, 36 bp, synthetic construct; identical to SEQ ID NO: 14414
  misc_feature 1..36: note = Synthetic oligonucleotide
  source 1..36: mol_type = other DNA

SEQ ID NO: 29732 - DNA, 36 bp, synthetic construct; identical to SEQ ID NO: 14414
  misc_feature 1..36: note = Synthetic oligonucleotide
  source 1..36: mol_type = other DNA

SEQ ID NO: 29733 - DNA, 36 bp, synthetic construct; identical to SEQ ID NO: 14414
  misc_feature 1..36: note = Synthetic oligonucleotide
  source 1..36: mol_type = other DNA

SEQ ID NO: 29734 - DNA, 36 bp, synthetic construct; identical to SEQ ID NO: 14415
  misc_feature 1..36: note = Synthetic oligonucleotide
  source 1..36: mol_type = other DNA

SEQ ID NO: 29735 - DNA, 36 bp, synthetic construct; identical to SEQ ID NO: 14416
  misc_feature 1..36: note = Synthetic oligonucleotide
  source 1..36: mol_type = other DNA

SEQ ID NO: 29736 - DNA, 36 bp, synthetic construct; identical to SEQ ID NO: 14417
  misc_feature 1..36: note = Synthetic oligonucleotide
  source 1..36: mol_type = other DNA

SEQ ID NO: 29737 - DNA, 36 bp, synthetic construct; identical to SEQ ID NO: 14417
  misc_feature 1..36: note = Synthetic oligonucleotide
  source 1..36: mol_type = other DNA

SEQ ID NO: 29738 - DNA, 36 bp, synthetic construct; identical to SEQ ID NO: 14417
  misc_feature 1..36: note = Synthetic oligonucleotide
  source 1..36: mol_type = other DNA

SEQ ID NO: 29739 - DNA, 36 bp, synthetic construct; identical to SEQ ID NO: 14417
  misc_feature 1..36: note = Synthetic oligonucleotide
  source 1..36: mol_type = other DNA

SEQ ID NO: 29740 - DNA, 36 bp, synthetic construct; identical to SEQ ID NO: 14417
  misc_feature 1..36: note = Synthetic oligonucleotide
  source 1..36: mol_type = other DNA

SEQ ID NO: 29741 - DNA, 36 bp, synthetic construct; identical to SEQ ID NO: 14417
  misc_feature 1..36: note = Synthetic oligonucleotide
  source 1..36: mol_type = other DNA

SEQ ID NO: 29742 - DNA, 36 bp, synthetic construct; identical to SEQ ID NO: 14417
  misc_feature 1..36: note = Synthetic oligonucleotide
  source 1..36: mol_type = other DNA

SEQ ID NO: 29743 - DNA, 36 bp, synthetic construct; identical to SEQ ID NO: 14417
  misc_feature 1..36: note = Synthetic oligonucleotide
  source 1..36: mol_type = other DNA

SEQ ID NO: 29744 - DNA, 36 bp, synthetic construct
  misc_feature 1..36: note = Synthetic oligonucleotide
  source 1..36: mol_type = other DNA
gtttgagagtagtgtaatttcgaagaggtcttaaac

SEQ ID NO: 29745 - DNA, 36 bp, synthetic construct; identical to SEQ ID NO: 14420
  misc_feature 1..36: note = Synthetic oligonucleotide
  source 1..36: mol_type = other DNA

SEQ ID NO: 29746 - DNA, 36 bp, synthetic construct
  misc_feature 1..36: note = Synthetic oligonucleotide
  source 1..36: mol_type = other DNA
gtttgagagtagtgtaatttctaagaggtcttaatc

SEQ ID NO: 29747 - DNA, 35 bp, synthetic construct; identical to SEQ ID NO: 14421
  misc_feature 1..35: note = Synthetic oligonucleotide
  source 1..35: mol_type = other DNA

SEQ ID NO: 29748 - DNA, 36 bp, synthetic construct
  misc_feature 1..36: note = Synthetic oligonucleotide
  source 1..36: mol_type = other DNA
gtttgagagtagtgtaattttataaggtagtaaaac

SEQ ID NO: 29749 - DNA, 36 bp, synthetic construct; identical to SEQ ID NO: 29748
  misc_feature 1..36: note = Synthetic oligonucleotide
  source 1..36: mol_type = other DNA

SEQ ID NO: 29750 - DNA, 36 bp, synthetic construct
  misc_feature 1..36: note = Synthetic oligonucleotide
  source 1..36: mol_type = other DNA
gtttgagagtagtgtaattttatagggtaatcaaac

SEQ ID NO: 29751 - DNA, 32 bp, synthetic construct
  misc_feature 1..32: note = Synthetic oligonucleotide
  source 1..32: mol_type = other DNA
gtttgagagtagtgtaattttatagggtacta

SEQ ID NO: 29752 - DNA, 32 bp, synthetic construct; identical to SEQ ID NO: 29751
  misc_feature 1..32: note = Synthetic oligonucleotide
  source 1..32: mol_type = other DNA

SEQ ID NO: 29753 - DNA, 32 bp, synthetic construct; identical to SEQ ID NO: 29751
  misc_feature 1..32: note = Synthetic oligonucleotide
  source 1..32: mol_type = other DNA

SEQ ID NO: 29754 - DNA, 36 bp, synthetic construct; identical to SEQ ID NO: 14423
  misc_feature 1..36: note = Synthetic oligonucleotide
  source 1..36: mol_type = other DNA

SEQ ID NO: 29755 - DNA, 36 bp, synthetic construct; identical to SEQ ID NO: 14423
  misc_feature 1..36: note = Synthetic oligonucleotide
  source 1..36: mol_type = other DNA

SEQ ID NO: 29756 - DNA, 36 bp, synthetic construct; identical to SEQ ID NO: 14423
  misc_feature 1..36: note = Synthetic oligonucleotide
  source 1..36: mol_type = other DNA

SEQ ID NO: 29757 - DNA, 36 bp, synthetic construct; identical to SEQ ID NO: 14423
  misc_feature 1..36: note = Synthetic oligonucleotide
  source 1..36: mol_type = other DNA

SEQ ID NO: 29758 - DNA, 36 bp, synthetic construct; identical to SEQ ID NO: 14423
  misc_feature 1..36: note = Synthetic oligonucleotide
  source 1..36: mol_type = other DNA

SEQ ID NO: 29759 - DNA, 36 bp, synthetic construct; identical to SEQ ID NO: 14425
  misc_feature 1..36: note = Synthetic oligonucleotide
  source 1..36: mol_type = other DNA

SEQ ID NO: 29760 - DNA, 36 bp, synthetic construct; identical to SEQ ID NO: 14425
  misc_feature 1..36: note = Synthetic oligonucleotide
  source 1..36: mol_type = other DNA

SEQ ID NO: 29761 - DNA, 36 bp, synthetic construct; identical to SEQ ID NO: 14425
  misc_feature 1..36: note = Synthetic oligonucleotide
  source 1..36: mol_type = other DNA

SEQ ID NO: 29762 - DNA, 36 bp, synthetic construct; identical to SEQ ID NO: 14425
  misc_feature 1..36: note = Synthetic oligonucleotide
  source 1..36: mol_type = other DNA

SEQ ID NO: 29763 - DNA, 36 bp, synthetic construct; identical to SEQ ID NO: 14425
  misc_feature 1..36: note = Synthetic oligonucleotide
  source 1..36: mol_type = other DNA

SEQ ID NO: 29764 - DNA, 36 bp, synthetic construct; identical to SEQ ID NO: 14425
  misc_feature 1..36: note = Synthetic oligonucleotide
  source 1..36: mol_type = other DNA

SEQ ID NO: 29765 - DNA, 36 bp, synthetic construct
  misc_feature 1..36: note = Synthetic oligonucleotide
  source 1..36: mol_type = other DNA
gtttgagagtagtgtaattttgtatggtagtaaaac

SEQ ID NO: 29766 - DNA, 36 bp, synthetic construct; identical to SEQ ID NO: 14433
  misc_feature 1..36: note = Synthetic oligonucleotide
  source 1..36: mol_type = other DNA

SEQ ID NO: 29767 - DNA, 36 bp, synthetic construct; identical to SEQ ID NO: 14433
  misc_feature 1..36: note = Synthetic oligonucleotide
  source 1..36: mol_type = other DNA

SEQ ID NO: 29768 - DNA, 36 bp, synthetic construct; identical to SEQ ID NO: 14434
  misc_feature 1..36: note = Synthetic oligonucleotide
  source 1..36: mol_type = other DNA

SEQ ID NO: 29769 - DNA, 36 bp, synthetic construct
  misc_feature 1..36: note = Synthetic oligonucleotide
  source 1..36: mol_type = other DNA
gtttgagagtagtgttgtttcataggggactcaaac

SEQ ID NO: 29770 - DNA, 36 bp, synthetic construct
  misc_feature 1..36: note = Synthetic oligonucleotide
  source 1..36: mol_type = other DNA
gtttgagagtattgtaatttcatatggtagtcaaac

SEQ ID NO: 29771 - DNA, 36 bp, synthetic construct
  misc_feature 1..36: note = Synthetic oligonucleotide
  source 1..36: mol_type = other DNA
gtttgagagtattgttaaaaccgaatagtcttatac

SEQ ID NO: 29772 - DNA, 37 bp, synthetic construct
  misc_feature 1..37: note = Synthetic oligonucleotide
  source 1..37: mol_type = other DNA
gtttgagagtattgttaaattgaataggtccaaaaca

SEQ ID NO: 29773 - DNA, 25 bp, synthetic construct
  misc_feature 1..25: note = Synthetic oligonucleotide
  source 1..25: mol_type = other DNA
gtttgagagtattgttattttgaat

SEQ ID NO: 29774 - DNA, 36 bp, synthetic construct
  misc_feature 1..36: note = Synthetic oligonucleotide
  source 1..36: mol_type = other DNA
gtttgagagtattgttatttttaatgggtacaaaac

SEQ ID NO: 29775 - DNA, 36 bp, synthetic construct; identical to SEQ ID NO: 14440
  misc_feature 1..36: note = Synthetic oligonucleotide
  source 1..36: mol_type = other DNA

SEQ ID NO: 29776 - DNA, 36 bp, synthetic construct
  misc_feature 1..36: note = Synthetic oligonucleotide
  source 1..36: mol_type = other DNA
gtttgagagtcgtgtaatatctgatggtagtcaaac

SEQ ID NO: 29777 - DNA, 36 bp, synthetic construct; identical to SEQ ID NO: 29776
  misc_feature 1..36: note = Synthetic oligonucleotide
  source 1..36: mol_type = other DNA

SEQ ID NO: 29778 - DNA, 36 bp, synthetic construct; identical to SEQ ID NO: 29776
  misc_feature 1..36: note = Synthetic oligonucleotide
  source 1..36: mol_type = other DNA

SEQ ID NO: 29779 - DNA, 27 bp, synthetic construct
  misc_feature 1..27: note = Synthetic oligonucleotide
  source 1..27: mol_type = other DNA
gtttgagagtcgtgttattttagatgg

SEQ ID NO: 29780 - DNA, 36 bp, synthetic construct; identical to SEQ ID NO: 14446
  misc_feature 1..36: note = Synthetic oligonucleotide
  source 1..36: mol_type = other DNA

SEQ ID NO: 29781 - DNA, 36 bp, synthetic construct; identical to SEQ ID NO: 14447
  misc_feature 1..36: note = Synthetic oligonucleotide
  source 1..36: mol_type = other DNA

SEQ ID NO: 29782 - DNA, 36 bp, synthetic construct; identical to SEQ ID NO: 14447
  misc_feature 1..36: note = Synthetic oligonucleotide
  source 1..36: mol_type = other DNA

SEQ ID NO: 29783 - DNA, 36 bp, synthetic construct; identical to SEQ ID NO: 14448
  misc_feature 1..36: note = Synthetic oligonucleotide
  source 1..36: mol_type = other DNA

SEQ ID NO: 29784 - DNA, 36 bp, synthetic construct; identical to SEQ ID NO: 14450
  misc_feature 1..36: note = Synthetic oligonucleotide
  source 1..36: mol_type = other DNA

SEQ ID NO: 29785 - DNA, 36 bp, synthetic construct
  misc_feature 1..36: note = Synthetic oligonucleotide
  source 1..36: mol_type = other DNA
gtttgagagtcttgttaatacagaaggatttcaaac

SEQ ID NO: 29786 - DNA, 36 bp, synthetic construct; identical to SEQ ID NO: 29785
  misc_feature 1..36: note = Synthetic oligonucleotide
  source 1..36: mol_type = other DNA

SEQ ID NO: 29787 - DNA, 36 bp, synthetic construct; identical to SEQ ID NO: 29785
  misc_feature 1..36: note = Synthetic oligonucleotide
  source 1..36: mol_type = other DNA

SEQ ID NO: 29788 - DNA, 36 bp, synthetic construct
  misc_feature 1..36: note = Synthetic oligonucleotide
  source 1..36: mol_type = other DNA
gtttgagagtcttgttaatacggaaggaattcaaac

SEQ ID NO: 29789 - DNA, 36 bp, synthetic construct
  misc_feature 1..36: note = Synthetic oligonucleotide
  source 1..36: mol_type = other DNA
gtttgagagtcttgttaatacggaaggaatttaaac

SEQ ID NO: 29790 - DNA, 36 bp, synthetic construct; identical to SEQ ID NO: 29789
  misc_feature 1..36: note = Synthetic oligonucleotide
  source 1..36: mol_type = other DNA

SEQ ID NO: 29791 - DNA, 36 bp, synthetic construct
  misc_feature 1..36: note = Synthetic oligonucleotide
  source 1..36: mol_type = other DNA
gtttgagagtcttgttaatacggaaggattcaaaac

SEQ ID NO: 29792 - DNA, 36 bp, synthetic construct; identical to SEQ ID NO: 29791
  misc_feature 1..36: note = Synthetic oligonucleotide
  source 1..36: mol_type = other DNA

SEQ ID NO: 29793 - DNA, 36 bp, synthetic construct; identical to SEQ ID NO: 29791
  misc_feature 1..36: note = Synthetic oligonucleotide
  source 1..36: mol_type = other DNA

SEQ ID NO: 29794 - DNA, 36 bp, synthetic construct
  misc_feature 1..36: note = Synthetic oligonucleotide
  source 1..36: mol_type = other DNA
gtttgagagtcttgttaatacggaaggatttcaaac

SEQ ID NO: 29795 - DNA, 36 bp, synthetic construct; identical to SEQ ID NO: 29794
  misc_feature 1..36: note = Synthetic oligonucleotide
  source 1..36: mol_type = other DNA

SEQ ID NO: 29796 - DNA, 36 bp, synthetic construct; identical to SEQ ID NO: 29794
  misc_feature 1..36: note = Synthetic oligonucleotide
  source 1..36: mol_type = other DNA

SEQ ID NO: 29797 - DNA, 36 bp, synthetic construct; identical to SEQ ID NO: 29794
  misc_feature 1..36: note = Synthetic oligonucleotide
  source 1..36: mol_type = other DNA

SEQ ID NO: 29798 - DNA, 36 bp, synthetic construct; identical to SEQ ID NO: 29794
  misc_feature 1..36: note = Synthetic oligonucleotide
  source 1..36: mol_type = other DNA

SEQ ID NO: 29799 - DNA, 36 bp, synthetic construct; identical to SEQ ID NO: 29794
  misc_feature 1..36: note = Synthetic oligonucleotide
  source 1..36: mol_type = other DNA

SEQ ID NO: 29800 - DNA, 36 bp, synthetic construct; identical to SEQ ID NO: 29794
  misc_feature 1..36: note = Synthetic oligonucleotide
  source 1..36: mol_type = other DNA

SEQ ID NO: 29801 - DNA, 36 bp, synthetic construct
  misc_feature 1..36: note = Synthetic oligonucleotide
  source 1..36: mol_type = other DNA
gtttgagagtcttgttaatacggaaggattttaaac

SEQ ID NO: 29802 - DNA, 36 bp, synthetic construct; identical to SEQ ID NO: 29801
  misc_feature 1..36: note = Synthetic oligonucleotide
  source 1..36: mol_type = other DNA

SEQ ID NO: 29803 - DNA, 36 bp, synthetic construct; identical to SEQ ID NO: 29801
  misc_feature 1..36: note = Synthetic oligonucleotide
  source 1..36: mol_type = other DNA

SEQ ID NO: 29804 - DNA, 36 bp, synthetic construct; identical to SEQ ID NO: 29801
  misc_feature 1..36: note = Synthetic oligonucleotide
  source 1..36: mol_type = other DNA

SEQ ID NO: 29805 - DNA, 36 bp, synthetic construct; identical to SEQ ID NO: 29801
  misc_feature 1..36: note = Synthetic oligonucleotide
  source 1..36: mol_type = other DNA

SEQ ID NO: 29806 - DNA, 36 bp, synthetic construct
  misc_feature 1..36: note = Synthetic oligonucleotide
  source 1..36: mol_type = other DNA
gtttgagagtcttgttattctgtaactatctaaaac

SEQ ID NO: 29807 - DNA, 36 bp, synthetic construct
  misc_feature 1..36: note = Synthetic oligonucleotide
  source 1..36: mol_type = other DNA
gtttgagagtcttgttattctgtaagtaactgaaac

SEQ ID NO: 29808 - DNA, 35 bp, synthetic construct
  misc_feature 1..35: note = Synthetic oligonucleotide
  source 1..35: mol_type = other DNA
gtttgagagtgatgtaatcttatatagtgactaat

SEQ ID NO: 29809 - DNA, 36 bp, synthetic construct; identical to SEQ ID NO: 14455
  misc_feature 1..36: note = Synthetic oligonucleotide
  source 1..36: mol_type = other DNA

SEQ ID NO: 29810 - DNA, 36 bp, synthetic construct; identical to SEQ ID NO: 14455
  misc_feature 1..36: note = Synthetic oligonucleotide
  source 1..36: mol_type = other DNA

SEQ ID NO: 29811 - DNA, 36 bp, synthetic construct; identical to SEQ ID NO: 14455
  misc_feature 1..36: note = Synthetic oligonucleotide
  source 1..36: mol_type = other DNA

SEQ ID NO: 29812 - DNA, 36 bp, synthetic construct; identical to SEQ ID NO: 14455
  misc_feature 1..36: note = Synthetic oligonucleotide
  source 1..36: mol_type = other DNA

SEQ ID NO: 29813 - DNA, 36 bp, synthetic construct; identical to SEQ ID NO: 14455
  misc_feature 1..36: note = Synthetic oligonucleotide
  source 1..36: mol_type = other DNA

SEQ ID NO: 29814 - DNA, 36 bp, synthetic construct; identical to SEQ ID NO: 14455
  misc_feature 1..36: note = Synthetic oligonucleotide
  source 1..36: mol_type = other DNA

SEQ ID NO: 29815 - DNA, 36 bp, synthetic construct; identical to SEQ ID NO: 14455
  misc_feature 1..36: note = Synthetic oligonucleotide
  source 1..36: mol_type = other DNA

SEQ ID NO: 29816 - DNA, 36 bp, synthetic construct
  misc_feature 1..36: note = Synthetic oligonucleotide
  source 1..36: mol_type = other DNA
gtttgagagtgatgtaattccagatagtggtaaacc

SEQ ID NO: 29817 - DNA, 22 bp, synthetic construct
  misc_feature 1..22: note = Synthetic oligonucleotide
  source 1..22: mol_type = other DNA
gtttgagagtgatgtaatttct

SEQ ID NO: 29818 - DNA, 36 bp, synthetic construct
  misc_feature 1..36: note = Synthetic oligonucleotide
  source 1..36: mol_type = other DNA
gtttgagagtgatgtaatttctgatagtactcgaac

SEQ ID NO: 29819 - DNA, 36 bp, synthetic construct; identical to SEQ ID NO: 14456
  misc_feature 1..36: note = Synthetic oligonucleotide
  source 1..36: mol_type = other DNA

SEQ ID NO: 29820 - DNA, 36 bp, synthetic construct; identical to SEQ ID NO: 14456
  misc_feature 1..36: note = Synthetic oligonucleotide
  source 1..36: mol_type = other DNA

SEQ ID NO: 29821 - DNA, 36 bp, synthetic construct; identical to SEQ ID NO: 14456
  misc_feature 1..36: note = Synthetic oligonucleotide
  source 1..36: mol_type = other DNA

SEQ ID NO: 29822 - DNA, 36 bp, synthetic construct; identical to SEQ ID NO: 14456
  misc_feature 1..36: note = Synthetic oligonucleotide
  source 1..36: mol_type = other DNA

SEQ ID NO: 29823 - DNA, 36 bp, synthetic construct; identical to SEQ ID NO: 14456
  misc_feature 1..36: note = Synthetic oligonucleotide
  source 1..36: mol_type = other DNA

SEQ ID NO: 29824 - DNA, 36 bp, synthetic construct
  misc_feature 1..36: note = Synthetic oligonucleotide
  source 1..36: mol_type = other DNA
gtttgagagtgatgtaatttctgatggtactcaaat

SEQ ID NO: 29825 - DNA, 36 bp, synthetic construct
  misc_feature 1..36: note = Synthetic oligonucleotide
  source 1..36: mol_type = other DNA
gtttgagagtgatgtaatttctgatggtgctcaaac

SEQ ID NO: 29826 - DNA, 36 bp, synthetic construct
  misc_feature 1..36: note = Synthetic oligonucleotide
  source 1..36: mol_type = other DNA
gtttgagagtgatgtgatttctgatggtactcaaac

SEQ ID NO: 29827 - DNA, 36 bp, synthetic construct; identical to SEQ ID NO: 29826
  misc_feature 1..36: note = Synthetic oligonucleotide
  source 1..36: mol_type = other DNA

SEQ ID NO: 29828 - DNA, 36 bp, synthetic construct
  misc_feature 1..36: note = Synthetic oligonucleotide
  source 1..36: mol_type = other DNA
gtttgagagtggtgtaattctaaaaggtagtaaaac

SEQ ID NO: 29829 - DNA, 36 bp, synthetic construct
  misc_feature 1..36: note = Synthetic oligonucleotide
  source 1..36: mol_type = other DNA
gtttgagagtgttgtcaaataagagggagtcaatac

SEQ ID NO: 29830 - DNA, 36 bp, synthetic construct
  misc_feature 1..36: note = Synthetic oligonucleotide
  source 1..36: mol_type = other DNA
gtttgagagtgttgtcaaataagaggtagtcgatac

SEQ ID NO: 29831 - DNA, 36 bp, synthetic construct
  misc_feature 1..36: note = Synthetic oligonucleotide
  source 1..36: mol_type = other DNA
gtttgagagtgttgtcaaataggagtcagaccaatc

SEQ ID NO: 29832 - DNA, 36 bp, synthetic construct
  misc_feature 1..36: note = Synthetic oligonucleotide
  source 1..36: mol_type = other DNA
gtttgagagttatgtaatttatgcactaggtaaaac

SEQ ID NO: 29833 - DNA, 36 bp, synthetic construct
  misc_feature 1..36: note = Synthetic oligonucleotide
  source 1..36: mol_type = other DNA
gtttgagagttatgtaattttaactactgctaaaac

SEQ ID NO: 29834 - DNA, 36 bp, synthetic construct
  misc_feature 1..36: note = Synthetic oligonucleotide
  source 1..36: mol_type = other DNA
gtttgagagttatgtaattttttatagtactaaaac

SEQ ID NO: 29835 - DNA, 36 bp, synthetic construct; identical to SEQ ID NO: 14464
  misc_feature 1..36: note = Synthetic oligonucleotide
  source 1..36: mol_type = other DNA

SEQ ID NO: 29836 - DNA, 36 bp, synthetic construct
  misc_feature 1..36: note = Synthetic oligonucleotide
  source 1..36: mol_type = other DNA
gtttgagagttgtgtaatttaaatctaggctttaac

SEQ ID NO: 29837 - DNA, 36 bp, synthetic construct; identical to SEQ ID NO: 29836
  misc_feature 1..36: note = Synthetic oligonucleotide
  source 1..36: mol_type = other DNA

SEQ ID NO: 29838 - DNA, 36 bp, synthetic construct; identical to SEQ ID NO: 29836
  misc_feature 1..36: note = Synthetic oligonucleotide
  source 1..36: mol_type = other DNA

SEQ ID NO: 29839 - DNA, 36 bp, synthetic construct
  misc_feature 1..36: note = Synthetic oligonucleotide
  source 1..36: mol_type = other DNA
gtttgagagttgtgtaatttaagatggatctcaaac

SEQ ID NO: 29840 - DNA, 36 bp, synthetic construct; identical to SEQ ID NO: 29839
  misc_feature 1..36: note = Synthetic oligonucleotide
  source 1..36: mol_type = other DNA

SEQ ID NO: 29841 - DNA, 36 bp, synthetic construct; identical to SEQ ID NO: 29839
  misc_feature 1..36: note = Synthetic oligonucleotide
  source 1..36: mol_type = other DNA

SEQ ID NO: 29842 - DNA, 36 bp, synthetic construct; identical to SEQ ID NO: 29839
  misc_feature 1..36: note = Synthetic oligonucleotide
  source 1..36: mol_type = other DNA

SEQ ID NO: 29843 - DNA, 36 bp, synthetic construct
  misc_feature 1..36: note = Synthetic oligonucleotide
  source 1..36: mol_type = other DNA
gtttgagagttgtgtaatttcgtagaggtattattc

SEQ ID NO: 29844 - DNA, 36 bp, synthetic construct; identical to SEQ ID NO: 29843
  misc_feature 1..36: note = Synthetic oligonucleotide
  source 1..36: mol_type = other DNA

SEQ ID NO: 29845 - DNA, 36 bp, synthetic construct
  misc_feature 1..36: note = Synthetic oligonucleotide
  source 1..36: mol_type = other DNA
gtttgagagttgtgtagtttcagatggtaatcaaac

SEQ ID NO: 29846 - DNA, 36 bp, synthetic construct; identical to SEQ ID NO: 29845
  misc_feature 1..36: note = Synthetic oligonucleotide
  source 1..36: mol_type = other DNA

SEQ ID NO: 29847 - DNA, 36 bp, synthetic construct
  misc_feature 1..36: note = Synthetic oligonucleotide
  source 1..36: mol_type = other DNA
gtttgagagttgtgttgtttctgatggtaaccaaac

SEQ ID NO: 29848 - DNA, 30 bp, synthetic construct
  misc_feature 1..30: note = Synthetic oligonucleotide
  source 1..30: mol_type = other DNA
gtttgagataggtgttatctcatagggtag

SEQ ID NO: 29849 - DNA, 36 bp, synthetic construct; identical to SEQ ID NO: 14470
  misc_feature 1..36: note = Synthetic oligonucleotide
  source 1..36: mol_type = other DNA

SEQ ID NO: 29850 - DNA, 24 bp, synthetic construct
  misc_feature 1..24: note = Synthetic oligonucleotide
  source 1..24: mol_type = other DNA
gtttgagatgtgtgtagaatatga

SEQ ID NO: 29851 - DNA, 36 bp, synthetic construct
  misc_feature 1..36: note = Synthetic oligonucleotide
  source 1..36: mol_type = other DNA
gtttgagcaccatacatttctacatcattctcaaac

SEQ ID NO: 29852 - DNA, 36 bp, synthetic construct; identical to SEQ ID NO: 29851
  misc_feature 1..36: note = Synthetic oligonucleotide
  source 1..36: mol_type = other DNA

SEQ ID NO: 29853 - DNA, 36 bp, synthetic construct; identical to SEQ ID NO: 29851
  misc_feature 1..36: note = Synthetic oligonucleotide
  source 1..36: mol_type = other DNA

SEQ ID NO: 29854 - DNA, 36 bp, synthetic construct; identical to SEQ ID NO: 29851
  misc_feature 1..36: note = Synthetic oligonucleotide
  source 1..36: mol_type = other DNA

SEQ ID NO: 29855 - DNA, 36 bp, synthetic construct; identical to SEQ ID NO: 29851
  misc_feature 1..36: note = Synthetic oligonucleotide
  source 1..36: mol_type = other DNA

SEQ ID NO: 29856 - DNA, 36 bp, synthetic construct; identical to SEQ ID NO: 29851
  misc_feature 1..36: note = Synthetic oligonucleotide
  source 1..36: mol_type = other DNA

SEQ ID NO: 29857 - DNA, 36 bp, synthetic construct
  misc_feature 1..36: note = Synthetic oligonucleotide
  source 1..36: mol_type = other DNA
gtttgagcaccatacattttacatcattttcaaacc

SEQ ID NO: 29858 - DNA, 36 bp, synthetic construct
  misc_feature 1..36: note = Synthetic oligonucleotide
  source 1..36: mol_type = other DNA
gtttgagcaccatacatttttacatcattctcaaac

SEQ ID NO: 29859 - DNA, 36 bp, synthetic construct; identical to SEQ ID NO: 14473
  misc_feature 1..36: note = Synthetic oligonucleotide
  source 1..36: mol_type = other DNA

SEQ ID NO: 29860 - DNA, 36 bp, synthetic construct
  misc_feature 1..36: note = Synthetic oligonucleotide
  source 1..36: mol_type = other DNA
gtttgagcgtagtgtgattctgtaaatgtctcaaac

SEQ ID NO: 29861 - DNA, 35 bp, synthetic construct
  misc_feature 1..35: note = Synthetic oligonucleotide
  source 1..35: mol_type = other DNA
gtttgagggtagtgttatctaaaagtatcctcaac

SEQ ID NO: 29862 - DNA, 36 bp, synthetic construct
  misc_feature 1..36: note = Synthetic oligonucleotide
  source 1..36: mol_type = other DNA
gtttgagtaccatacatttctacatcattctcaaac

SEQ ID NO: 29863 - DNA, 36 bp, synthetic construct; identical to SEQ ID NO: 29862
  misc_feature 1..36: note = Synthetic oligonucleotide
  source 1..36: mol_type = other DNA

SEQ ID NO: 29864 - DNA, 36 bp, synthetic construct; identical to SEQ ID NO: 29862
  misc_feature 1..36: note = Synthetic oligonucleotide
  source 1..36: mol_type = other DNA

SEQ ID NO: 29865 - DNA, 36 bp, synthetic construct; identical to SEQ ID NO: 14477
  misc_feature 1..36: note = Synthetic oligonucleotide
  source 1..36: mol_type = other DNA

SEQ ID NO: 29866 - DNA, 36 bp, synthetic construct; identical to SEQ ID NO: 14477
  misc_feature 1..36: note = Synthetic oligonucleotide
  source 1..36: mol_type = other DNA

SEQ ID NO: 29867 - DNA, 36 bp, synthetic construct; identical to SEQ ID NO: 14477
  misc_feature 1..36: note = Synthetic oligonucleotide
  source 1..36: mol_type = other DNA

SEQ ID NO: 29868 - DNA, 36 bp, synthetic construct; identical to SEQ ID NO: 14477
  misc_feature 1..36: note = Synthetic oligonucleotide
  source 1..36: mol_type = other DNA

SEQ ID NO: 29869 - DNA, 36 bp, synthetic construct; identical to SEQ ID NO: 14477
  misc_feature 1..36: note = Synthetic oligonucleotide
  source 1..36: mol_type = other DNA

SEQ ID NO: 29870 - DNA, 36 bp, synthetic construct; identical to SEQ ID NO: 14477
  misc_feature 1..36: note = Synthetic oligonucleotide
  source 1..36: mol_type = other DNA

SEQ ID NO: 29871 - DNA, 36 bp, synthetic construct; identical to SEQ ID NO: 14477
  misc_feature 1..36: note = Synthetic oligonucleotide
  source 1..36: mol_type = other DNA

SEQ ID NO: 29872 - DNA, 36 bp, synthetic construct; identical to SEQ ID NO: 14477
  misc_feature 1..36: note = Synthetic oligonucleotide
  source 1..36: mol_type = other DNA

SEQ ID NO: 29873 - DNA, 36 bp, synthetic construct; identical to SEQ ID NO: 14477
  misc_feature 1..36: note = Synthetic oligonucleotide
  source 1..36: mol_type = other DNA

SEQ ID NO: 29874 - DNA, 36 bp, synthetic construct; identical to SEQ ID NO: 14477
  misc_feature 1..36: note = Synthetic oligonucleotide
  source 1..36: mol_type = other DNA

SEQ ID NO: 29875 - DNA, 36 bp, synthetic construct; identical to SEQ ID NO: 14477
  misc_feature 1..36: note = Synthetic oligonucleotide
  source 1..36: mol_type = other DNA

SEQ ID NO: 29876 - DNA, 36 bp, synthetic construct; identical to SEQ ID NO: 14477
  misc_feature 1..36: note = Synthetic oligonucleotide
  source 1..36: mol_type = other DNA

SEQ ID NO: 29877 - DNA, 36 bp, synthetic construct; identical to SEQ ID NO: 14477
  misc_feature 1..36: note = Synthetic oligonucleotide
  source 1..36: mol_type = other DNA

SEQ ID NO: 29878 - DNA, 36 bp, synthetic construct; identical to SEQ ID NO: 14477
  misc_feature 1..36: note = Synthetic oligonucleotide
  source 1..36: mol_type = other DNA

SEQ ID NO: 29879 - DNA, 36 bp, synthetic construct; identical to SEQ ID NO: 14477
  misc_feature 1..36: note = Synthetic oligonucleotide
  source 1..36: mol_type = other DNA

SEQ ID NO: 29880 - DNA, 36 bp, synthetic construct; identical to SEQ ID NO: 14477
  misc_feature 1..36: note = Synthetic oligonucleotide
  source 1..36: mol_type = other DNA

SEQ ID NO: 29881 - DNA, 36 bp, synthetic construct; identical to SEQ ID NO: 14477
  misc_feature 1..36: note = Synthetic oligonucleotide
  source 1..36: mol_type = other DNA

SEQ ID NO: 29882 - DNA, 36 bp, synthetic construct; identical to SEQ ID NO: 14477
  misc_feature 1..36: note = Synthetic oligonucleotide
  source 1..36: mol_type = other DNA

SEQ ID NO: 29883 - DNA, 36 bp, synthetic construct; identical to SEQ ID NO: 14477
  misc_feature 1..36: note = Synthetic oligonucleotide
  source 1..36: mol_type = other DNA

SEQ ID NO: 29884 - DNA, 38 bp, synthetic construct
  misc_feature 1..38: note = Synthetic oligonucleotide
  source 1..38: mol_type = other DNA
gtttgagtaccatacatttttacatcattctcaaacct

SEQ ID NO: 29885 - DNA, 36 bp, synthetic construct
  misc_feature 1..36: note = Synthetic oligonucleotide
  source 1..36: mol_type = other DNA
gtttgagtaccatacgtttttacatcattctcaaac

SEQ ID NO: 29886 - DNA, 36 bp, synthetic construct
  misc_feature 1..36: note = Synthetic oligonucleotide
  source 1..36: mol_type = other DNA
gtttgagtaccatcagaaatcacatcactctcaaac

SEQ ID NO: 29887 - DNA, 36 bp, synthetic construct; identical to SEQ ID NO: 14479
  misc_feature 1..36: note = Synthetic oligonucleotide
  source 1..36: mol_type = other DNA

SEQ ID NO: 29888 - DNA, 36 bp, synthetic construct; identical to SEQ ID NO: 14479
  misc_feature 1..36: note = Synthetic oligonucleotide
  source 1..36: mol_type = other DNA

SEQ ID NO: 29889 - DNA, 36 bp, synthetic construct; identical to SEQ ID NO: 14479
  misc_feature 1..36: note = Synthetic oligonucleotide
  source 1..36: mol_type = other DNA

SEQ ID NO: 29890 - DNA, 36 bp, synthetic construct; identical to SEQ ID NO: 14479
  misc_feature 1..36: note = Synthetic oligonucleotide
  source 1..36: mol_type = other DNA

SEQ ID NO: 29891 - DNA, 36 bp, synthetic construct; identical to SEQ ID NO: 14479
  misc_feature 1..36: note = Synthetic oligonucleotide
  source 1..36: mol_type = other DNA

SEQ ID NO: 29892 - DNA, 36 bp, synthetic construct; identical to SEQ ID NO: 14479
  misc_feature 1..36: note = Synthetic oligonucleotide
  source 1..36: mol_type = other DNA

SEQ ID NO: 29893 - DNA, 36 bp, synthetic construct; identical to SEQ ID NO: 14479
  misc_feature 1..36: note = Synthetic oligonucleotide
  source 1..36: mol_type = other DNA

SEQ ID NO: 29894 - DNA, 36 bp, synthetic construct; identical to SEQ ID NO: 14479
  misc_feature 1..36: note = Synthetic oligonucleotide
  source 1..36: mol_type = other DNA

SEQ ID NO: 29895 - DNA, 36 bp, synthetic construct; identical to SEQ ID NO: 14479
  misc_feature 1..36: note = Synthetic oligonucleotide
  source 1..36: mol_type = other DNA

SEQ ID NO: 29896 - DNA, 36 bp, synthetic construct; identical to SEQ ID NO: 14479
  misc_feature 1..36: note = Synthetic oligonucleotide
  source 1..36: mol_type = other DNA

SEQ ID NO: 29897 - DNA, 36 bp, synthetic construct; identical to SEQ ID NO: 14483
  misc_feature 1..36: note = Synthetic oligonucleotide
  source 1..36: mol_type = other DNA

SEQ ID NO: 29898 - DNA, 36 bp, synthetic construct; identical to SEQ ID NO: 14483
  misc_feature 1..36: note = Synthetic oligonucleotide
  source 1..36: mol_type = other DNA

SEQ ID NO: 29899 - DNA, 36 bp, synthetic construct; identical to SEQ ID NO: 14483
  misc_feature 1..36: note = Synthetic oligonucleotide
  source 1..36: mol_type = other DNA

SEQ ID NO: 29900 - DNA, 36 bp, synthetic construct; identical to SEQ ID NO: 14483
  misc_feature 1..36: note = Synthetic oligonucleotide
  source 1..36: mol_type = other DNA

SEQ ID NO: 29901 - DNA, 36 bp, synthetic construct; identical to SEQ ID NO: 14484
  misc_feature 1..36: note = Synthetic oligonucleotide
  source 1..36: mol_type = other DNA

SEQ ID NO: 29902 - DNA, 36 bp, synthetic construct; identical to SEQ ID NO: 14484
  misc_feature 1..36: note = Synthetic oligonucleotide
  source 1..36: mol_type = other DNA

SEQ ID NO: 29903 - DNA, 36 bp, synthetic construct
  misc_feature 1..36: note = Synthetic oligonucleotide
  source 1..36: mol_type = other DNA
gtttgagtaccattgaagattacactactctcaaac

SEQ ID NO: 29904 - DNA, 36 bp, synthetic construct; identical to SEQ ID NO: 29903
  misc_feature 1..36: note = Synthetic oligonucleotide
  source 1..36: mol_type = other DNA

SEQ ID NO: 29905 - DNA, 36 bp, synthetic construct; identical to SEQ ID NO: 14485
  misc_feature 1..36: note = Synthetic oligonucleotide
  source 1..36: mol_type = other DNA

SEQ ID NO: 29906 - DNA, 36 bp, synthetic construct; identical to SEQ ID NO: 14486
  misc_feature 1..36: note = Synthetic oligonucleotide
  source 1..36: mol_type = other DNA

SEQ ID NO: 29907 - DNA, 36 bp, synthetic construct
  misc_feature 1..36: note = Synthetic oligonucleotide
  source 1..36: mol_type = other DNA
gtttgagtactatacatttttacatcattctcaaac

SEQ ID NO: 29908 - DNA, 36 bp, synthetic construct; identical to SEQ ID NO: 29907
  misc_feature 1..36: note = Synthetic oligonucleotide
  source 1..36: mol_type = other DNA

SEQ ID NO: 29909 - DNA, 36 bp, synthetic construct; identical to SEQ ID NO: 29907
  misc_feature 1..36: note = Synthetic oligonucleotide
  source 1..36: mol_type = other DNA

SEQ ID NO: 29910 - DNA, 36 bp, synthetic construct; identical to SEQ ID NO: 29907
  misc_feature 1..36: note = Synthetic oligonucleotide
  source 1..36: mol_type = other DNA

SEQ ID NO: 29911 - DNA, 36 bp, synthetic construct; identical to SEQ ID NO: 29907
  misc_feature 1..36: note = Synthetic oligonucleotide
  source 1..36: mol_type = other DNA

SEQ ID NO: 29912 - DNA, 36 bp, synthetic construct; identical to SEQ ID NO: 29907
  misc_feature 1..36: note = Synthetic oligonucleotide
  source 1..36: mol_type = other DNA

SEQ ID NO: 29913 - DNA, 36 bp, synthetic construct; identical to SEQ ID NO: 29907
  misc_feature 1..36: note = Synthetic oligonucleotide
  source 1..36: mol_type = other DNA

SEQ ID NO: 29914 - DNA, 36 bp, synthetic construct; identical to SEQ ID NO: 29907
  misc_feature 1..36: note = Synthetic oligonucleotide
  source 1..36: mol_type = other DNA

SEQ ID NO: 29915 - DNA, 36 bp, synthetic construct; identical to SEQ ID NO: 29907
  misc_feature 1..36: note = Synthetic oligonucleotide
  source 1..36: mol_type = other DNA

SEQ ID NO: 29916 - DNA, 36 bp, synthetic construct; identical to SEQ ID NO: 29907
  misc_feature 1..36: note = Synthetic oligonucleotide
  source 1..36: mol_type = other DNA

SEQ ID NO: 29917 - DNA, 36 bp, synthetic construct; identical to SEQ ID NO: 29907
  misc_feature 1..36: note = Synthetic oligonucleotide
  source 1..36: mol_type = other DNA

SEQ ID NO: 29918 - DNA, 36 bp, synthetic construct; identical to SEQ ID NO: 29907
  misc_feature 1..36: note = Synthetic oligonucleotide
  source 1..36: mol_type = other DNA

SEQ ID NO: 29919 - DNA, 36 bp, synthetic construct; identical to SEQ ID NO: 29907
  misc_feature 1..36: note = Synthetic oligonucleotide
  source 1..36: mol_type = other DNA

SEQ ID NO: 29920 - DNA, 36 bp, synthetic construct; identical to SEQ ID NO: 29907
  misc_feature 1..36: note = Synthetic oligonucleotide
  source 1..36: mol_type = other DNA

SEQ ID NO: 29921 - DNA, 36 bp, synthetic construct; identical to SEQ ID NO: 29907
  misc_feature 1..36: note = Synthetic oligonucleotide
  source 1..36: mol_type = other DNA

SEQ ID NO: 29922 - DNA, 36 bp, synthetic construct; identical to SEQ ID NO: 29907
  misc_feature 1..36: note = Synthetic oligonucleotide
  source 1..36: mol_type = other DNA

SEQ ID NO: 29923 - DNA, 36 bp, synthetic construct; identical to SEQ ID NO: 29907
  misc_feature 1..36: note = Synthetic oligonucleotide
  source 1..36: mol_type = other DNA

SEQ ID NO: 29924 - DNA, 36 bp, synthetic construct; identical to SEQ ID NO: 29907
  misc_feature 1..36: note = Synthetic oligonucleotide
  source 1..36: mol_type = other DNA

SEQ ID NO: 29925 - DNA, 36 bp, synthetic construct; identical to SEQ ID NO: 29907
  misc_feature 1..36: note = Synthetic oligonucleotide
  source 1..36: mol_type = other DNA

SEQ ID NO: 29926 - DNA, 36 bp, synthetic construct; identical to SEQ ID NO: 29907
  misc_feature 1..36: note = Synthetic oligonucleotide
  source 1..36: mol_type = other DNA

SEQ ID NO: 29927 - DNA, 36 bp, synthetic construct; identical to SEQ ID NO: 29907
  misc_feature 1..36: note = Synthetic oligonucleotide
  source 1..36: mol_type = other DNA

SEQ ID NO: 29928 - DNA, 36 bp, synthetic construct; identical to SEQ ID NO: 29907
  misc_feature 1..36: note = Synthetic oligonucleotide
  source 1..36: mol_type = other DNA

SEQ ID NO: 29929 - DNA, 36 bp, synthetic construct; identical to SEQ ID NO: 29907
  misc_feature 1..36: note = Synthetic oligonucleotide
  source 1..36: mol_type = other DNA

SEQ ID NO: 29930 - DNA, 36 bp, synthetic construct
  misc_feature 1..36: note = Synthetic oligonucleotide
  source 1..36: mol_type = other DNA
gtttgagtactatacatttttacatcattctccaac

SEQ ID NO: 29931 - DNA, 36 bp, synthetic construct; identical to SEQ ID NO: 29930
  misc_feature 1..36: note = Synthetic oligonucleotide
  source 1..36: mol_type = other DNA

SEQ ID NO: 29932 - DNA, 36 bp, synthetic construct; identical to SEQ ID NO: 14488
  misc_feature 1..36: note = Synthetic oligonucleotide
  source 1..36: mol_type = other DNA

SEQ ID NO: 29933 - DNA, 36 bp, synthetic construct; identical to SEQ ID NO: 14488
  misc_feature 1..36: note = Synthetic oligonucleotide
  source 1..36: mol_type = other DNA

SEQ ID NO: 29934 - DNA, 36 bp, synthetic construct; identical to SEQ ID NO: 14488
  misc_feature 1..36: note = Synthetic oligonucleotide
  source 1..36: mol_type = other DNA

SEQ ID NO: 29935 - DNA, 36 bp, synthetic construct; identical to SEQ ID NO: 14488
  misc_feature 1..36: note = Synthetic oligonucleotide
  source 1..36: mol_type = other DNA

SEQ ID NO: 29936 - DNA, 36 bp, synthetic construct; identical to SEQ ID NO: 14488
  misc_feature 1..36: note = Synthetic oligonucleotide
  source 1..36: mol_type = other DNA

SEQ ID NO: 29937 - DNA, 36 bp, synthetic construct; identical to SEQ ID NO: 14488
  misc_feature 1..36: note = Synthetic oligonucleotide
  source 1..36: mol_type = other DNA

SEQ ID NO: 29938 - DNA, 36 bp, synthetic construct; identical to SEQ ID NO: 14488
  misc_feature 1..36: note = Synthetic oligonucleotide
  source 1..36: mol_type = other DNA

SEQ ID NO: 29939 - DNA, 36 bp, synthetic construct; identical to SEQ ID NO: 14488
  misc_feature 1..36: note = Synthetic oligonucleotide
  source 1..36: mol_type = other DNA

SEQ ID NO: 29940 - DNA, 36 bp, synthetic construct; identical to SEQ ID NO: 14488
  misc_feature 1..36: note = Synthetic oligonucleotide
  source 1..36: mol_type = other DNA

SEQ ID NO: 29941 - DNA, 36 bp, synthetic construct; identical to SEQ ID NO: 14488
  misc_feature 1..36: note = Synthetic oligonucleotide
  source 1..36: mol_type = other DNA

SEQ ID NO: 29942 - DNA, 36 bp, synthetic construct; identical to SEQ ID NO: 14488
  misc_feature 1..36: note = Synthetic oligonucleotide
  source 1..36: mol_type = other DNA

SEQ ID NO: 29943 - DNA, 36 bp, synthetic construct; identical to SEQ ID NO: 14488
  misc_feature 1..36: note = Synthetic oligonucleotide
  source 1..36: mol_type = other DNA

SEQ ID NO: 29944 - DNA, 36 bp, synthetic construct; identical to SEQ ID NO: 14488
  misc_feature 1..36: note = Synthetic oligonucleotide
  source 1..36: mol_type = other DNA

SEQ ID NO: 29945 - DNA, 36 bp, synthetic construct; identical to SEQ ID NO: 14488
  misc_feature 1..36: note = Synthetic oligonucleotide
  source 1..36: mol_type = other DNA

SEQ ID NO: 29946 - DNA, 36 bp, synthetic construct; identical to SEQ ID NO: 14488
  misc_feature 1..36: note = Synthetic oligonucleotide
  source 1..36: mol_type = other DNA

SEQ ID NO: 29947 - DNA, 36 bp, synthetic construct; identical to SEQ ID NO: 14488
  misc_feature 1..36: note = Synthetic oligonucleotide
  source 1..36: mol_type = other DNA

SEQ ID NO: 29948 - DNA, 36 bp, synthetic construct; identical to SEQ ID NO: 14488
  misc_feature 1..36: note = Synthetic oligonucleotide
  source 1..36: mol_type = other DNA

SEQ ID NO: 29949 - DNA, 36 bp, synthetic construct; identical to SEQ ID NO: 14488
  misc_feature 1..36: note = Synthetic oligonucleotide
  source 1..36: mol_type = other DNA

SEQ ID NO: 29950 - DNA, 36 bp, synthetic construct; identical to SEQ ID NO: 14488
  misc_feature 1..36: note = Synthetic oligonucleotide
  source 1..36: mol_type = other DNA

SEQ ID NO: 29951 - DNA, 36 bp, synthetic construct; identical to SEQ ID NO: 14488
  misc_feature 1..36: note = Synthetic oligonucleotide
  source 1..36: mol_type = other DNA

SEQ ID NO: 29952 - DNA, 36 bp, synthetic construct; identical to SEQ ID NO: 14488
  misc_feature 1..36: note = Synthetic oligonucleotide
  source 1..36: mol_type = other DNA

SEQ ID NO: 29953 - DNA, 36 bp, synthetic construct; identical to SEQ ID NO: 14488
  misc_feature 1..36: note = Synthetic oligonucleotide
  source 1..36: mol_type = other DNA

SEQ ID NO: 29954 - DNA, 36 bp, synthetic construct; identical to SEQ ID NO: 14488
  misc_feature 1..36: note = Synthetic oligonucleotide
  source 1..36: mol_type = other DNA

SEQ ID NO: 29955 - DNA, 36 bp, synthetic construct; identical to SEQ ID NO: 14488
  misc_feature 1..36: note = Synthetic oligonucleotide
  source 1..36: mol_type = other DNA

SEQ ID NO: 29956 - DNA, 36 bp, synthetic construct; identical to SEQ ID NO: 14488
  misc_feature 1..36: note = Synthetic oligonucleotide
  source 1..36: mol_type = other DNA

SEQ ID NO: 29957 - DNA, 37 bp, synthetic construct
  misc_feature 1..37: note = Synthetic oligonucleotide
  source 1..37: mol_type = other DNA
gtttgagtatggtgcaattttaaagggtagtcaaaca

SEQ ID NO: 29958 - DNA, 37 bp, synthetic construct
  misc_feature 1..37: note = Synthetic oligonucleotide
  source 1..37: mol_type = other DNA
gtttgagtatggtgcaattttaaagggtagtcaaact

SEQ ID NO: 29959 - DNA, 36 bp, synthetic construct; identical to SEQ ID NO: 14490
  misc_feature 1..36: note = Synthetic oligonucleotide
  source 1..36: mol_type = other DNA

SEQ ID NO: 29960 - DNA, 36 bp, synthetic construct; identical to SEQ ID NO: 14490
  misc_feature 1..36: note = Synthetic oligonucleotide
  source 1..36: mol_type = other DNA

SEQ ID NO: 29961 - DNA, 36 bp, synthetic construct
  misc_feature 1..36: note = Synthetic oligonucleotide
  source 1..36: mol_type = other DNA
gtttgagtatggtgtaatcctgaacggtagtcaaac

SEQ ID NO: 29962 - DNA, 36 bp, synthetic construct
  misc_feature 1..36: note = Synthetic oligonucleotide
  source 1..36: mol_type = other DNA
gtttgagtatggtgtaattttaaatggtagtcaaac

SEQ ID NO: 29963 - DNA, 36 bp, synthetic construct; identical to SEQ ID NO: 29962
  misc_feature 1..36: note = Synthetic oligonucleotide
  source 1..36: mol_type = other DNA

SEQ ID NO: 29964 - DNA, 36 bp, synthetic construct; identical to SEQ ID NO: 14492
  misc_feature 1..36: note = Synthetic oligonucleotide
  source 1..36: mol_type = other DNA

SEQ ID NO: 29965 - DNA, 36 bp, synthetic construct
  misc_feature 1..36: note = Synthetic oligonucleotide
  source 1..36: mol_type = other DNA
gtttgagtcccctctggaaatacacggctctcaaac

SEQ ID NO: 29966 - DNA, 36 bp, synthetic construct; identical to SEQ ID NO: 29965
  misc_feature 1..36: note = Synthetic oligonucleotide
  source 1..36: mol_type = other DNA

SEQ ID NO: 29967 - DNA, 36 bp, synthetic construct; identical to SEQ ID NO: 29965
  misc_feature 1..36: note = Synthetic oligonucleotide
  source 1..36: mol_type = other DNA

SEQ ID NO: 29968 - DNA, 36 bp, synthetic construct; identical to SEQ ID NO: 29965
  misc_feature 1..36: note = Synthetic oligonucleotide
  source 1..36: mol_type = other DNA

SEQ ID NO: 29969 - DNA, 36 bp, synthetic construct
  misc_feature 1..36: note = Synthetic oligonucleotide
  source 1..36: mol_type = other DNA
gtttgagtcccttataaaattacactactctcaaac

SEQ ID NO: 29970 - DNA, 36 bp, synthetic construct; identical to SEQ ID NO: 29969
  misc_feature 1..36: note = Synthetic oligonucleotide
  source 1..36: mol_type = other DNA

SEQ ID NO: 29971 - DNA, 36 bp, synthetic construct; identical to SEQ ID NO: 29969
  misc_feature 1..36: note = Synthetic oligonucleotide
  source 1..36: mol_type = other DNA

SEQ ID NO: 29972 - DNA, 36 bp, synthetic construct; identical to SEQ ID NO: 29969
  misc_feature 1..36: note = Synthetic oligonucleotide
  source 1..36: mol_type = other DNA

SEQ ID NO: 29973 - DNA, 36 bp, synthetic construct
  misc_feature 1..36: note = Synthetic oligonucleotide
  source 1..36: mol_type = other DNA
gtttgagtcccttattaaactacactactctcaaac

SEQ ID NO: 29974 - DNA, 36 bp, synthetic construct
  misc_feature 1..36: note = Synthetic oligonucleotide
  source 1..36: mol_type = other DNA
gtttgagtcctctatggaattacactactctcaaac

SEQ ID NO: 29975 - DNA, 36 bp, synthetic construct
  misc_feature 1..36: note = Synthetic oligonucleotide
  source 1..36: mol_type = other DNA
gtttgataaccctataaaattacacctttctcaaac

SEQ ID NO: 29976 - DNA, 25 bp, synthetic construct
  misc_feature 1..25: note = Synthetic oligonucleotide
  source 1..25: mol_type = other DNA
gtttgataaccttatgaactaacag

SEQ ID NO: 29977 - DNA, 25 bp, synthetic construct
  misc_feature 1..25: note = Synthetic oligonucleotide
  source 1..25: mol_type = other DNA
gtttgataaccttatgaactaacag

SEQ ID NO: 29978 - DNA, 25 bp, synthetic construct
  misc_feature 1..25: note = Synthetic oligonucleotide
  source 1..25: mol_type = other DNA
gtttgataaccttatgaactaacag

SEQ ID NO: 29979 - DNA, 25 bp, synthetic construct
  misc_feature 1..25: note = Synthetic oligonucleotide
  source 1..25: mol_type = other DNA
gtttgataaccttatgaactaacag

SEQ ID NO: 29980 - DNA, 25 bp, synthetic construct
  misc_feature 1..25: note = Synthetic oligonucleotide
  source 1..25: mol_type = other DNA
gtttgataaccttttgtttaacagt

SEQ ID NO: 29981 - DNA, 25 bp, synthetic construct
  misc_feature 1..25: note = Synthetic oligonucleotide
  source 1..25: mol_type = other DNA
gtttgataaccttttgtttaacagt

SEQ ID NO: 29982 - DNA, 35 bp, synthetic construct
  misc_feature 1..35: note = Synthetic oligonucleotide
  source 1..35: mol_type = other DNA
gtttgataaccttttgtttaacagtactctcaaat

SEQ ID NO: 29983 - DNA, 36 bp, synthetic construct
  misc_feature 1..36: note = Synthetic oligonucleotide
  source 1..36: mol_type = other DNA
gtttgatacccatctgaaattacactactctcaaac

SEQ ID NO: 29984 - DNA, 36 bp, synthetic construct
  misc_feature 1..36: note = Synthetic oligonucleotide
  source 1..36: mol_type = other DNA
gtttgatatccctatgaatttacattgctctcaaac

SEQ ID NO: 29985 - DNA, 36 bp, synthetic construct
  misc_feature 1..36: note = Synthetic oligonucleotide
  source 1..36: mol_type = other DNA
gtttgatattcctatgaatttacactactctcaaac

SEQ ID NO: 29986 - DNA, 36 bp, synthetic construct
  misc_feature 1..36: note = Synthetic oligonucleotide
  source 1..36: mol_type = other DNA
gtttgatattcctatgaatttacactgctctcaaac

SEQ ID NO: 29987 - DNA, 36 bp, synthetic construct
  misc_feature 1..36: note = Synthetic oligonucleotide
  source 1..36: mol_type = other DNA
gtttgatcactctaaataattacacacctctcaaac

SEQ ID NO: 29988 - DNA, 30 bp, synthetic construct
  misc_feature 1..30: note = Synthetic oligonucleotide
  source 1..30: mol_type = other DNA
gtttgattaaagattagaaaaaacgatatt

SEQ ID NO: 29989 - DNA, 36 bp, synthetic construct
  misc_feature 1..36: note = Synthetic oligonucleotide
  source 1..36: mol_type = other DNA
gtttgattaccagtcaaaatgacactgctccaaaac

SEQ ID NO: 29990 - DNA, 36 bp, synthetic construct; identical to SEQ ID NO: 29989
  misc_feature 1..36: note = Synthetic oligonucleotide
  source 1..36: mol_type = other DNA

SEQ ID NO: 29991 - DNA, 36 bp, synthetic construct; identical to SEQ ID NO: 14498
  misc_feature 1..36: note = Synthetic oligonucleotide
  source 1..36: mol_type = other DNA

SEQ ID NO: 29992 - DNA, 36 bp, synthetic construct
  misc_feature 1..36: note = Synthetic oligonucleotide
  source 1..36: mol_type = other DNA
gtttgattaccagtcagttcgacactgctccaaaac

SEQ ID NO: 29993 - DNA, 36 bp, synthetic construct
  misc_feature 1..36: note = Synthetic oligonucleotide
  source 1..36: mol_type = other DNA
gtttgattaccagttagatcgacactactccaaaac

SEQ ID NO: 29994 - DNA, 36 bp, synthetic construct; identical to SEQ ID NO: 14502
  misc_feature 1..36: note = Synthetic oligonucleotide
  source 1..36: mol_type = other DNA

SEQ ID NO: 29995 - DNA, 36 bp, synthetic construct
  misc_feature 1..36: note = Synthetic oligonucleotide
  source 1..36: mol_type = other DNA
gtttgattaccagttagatcgacactgctccaaaat

SEQ ID NO: 29996 - DNA, 36 bp, synthetic construct
  misc_feature 1..36: note = Synthetic oligonucleotide
  source 1..36: mol_type = other DNA
gtttgattaccatatgaaattacactactctcaaac

SEQ ID NO: 29997 - DNA, 36 bp, synthetic construct; identical to SEQ ID NO: 29996
  misc_feature 1..36: note = Synthetic oligonucleotide
  source 1..36: mol_type = other DNA

SEQ ID NO: 29998 - DNA, 36 bp, synthetic construct; identical to SEQ ID NO: 29996
  misc_feature 1..36: note = Synthetic oligonucleotide
  source 1..36: mol_type = other DNA

SEQ ID NO: 29999 - DNA, 36 bp, synthetic construct; identical to SEQ ID NO: 29996
  misc_feature 1..36: note = Synthetic oligonucleotide
  source 1..36: mol_type = other DNA

SEQ ID NO: 30000 - DNA, 36 bp, synthetic construct; identical to SEQ ID NO: 29996
  misc_feature 1..36: note = Synthetic oligonucleotide
  source 1..36: mol_type = other DNA

SEQ ID NO: 30001 - DNA, 36 bp, synthetic construct; identical to SEQ ID NO: 29996
  misc_feature 1..36: note = Synthetic oligonucleotide
  source 1..36: mol_type = other DNA

SEQ ID NO: 30002 - DNA, 36 bp, synthetic construct
  misc_feature 1..36: note = Synthetic oligonucleotide
  source 1..36: mol_type = other DNA
gtttgattaccatatgagattacactactctcaaac

SEQ ID NO: 30003 - DNA, 36 bp, synthetic construct
  misc_feature 1..36: note = Synthetic oligonucleotide
  source 1..36: mol_type = other DNA
gtttgattaccctataaaattacactactctcaaac

SEQ ID NO: 30004 - DNA, 36 bp, synthetic construct
  misc_feature 1..36: note = Synthetic oligonucleotide
  source 1..36: mol_type = other DNA
gtttgattaccctattcttttacactgctctcaaac

SEQ ID NO: 30005 - DNA, 36 bp, synthetic construct; identical to SEQ ID NO: 14503
  misc_feature 1..36: note = Synthetic oligonucleotide
  source 1..36: mol_type = other DNA

SEQ ID NO: 30006 - DNA, 36 bp, synthetic construct; identical to SEQ ID NO: 14503
  misc_feature 1..36: note = Synthetic oligonucleotide
  source 1..36: mol_type = other DNA

SEQ ID NO: 30007 - DNA, 36 bp, synthetic construct; identical to SEQ ID NO: 14503
  misc_feature 1..36: note = Synthetic oligonucleotide
  source 1..36: mol_type = other DNA

SEQ ID NO: 30008 - DNA, 36 bp, synthetic construct; identical to SEQ ID NO: 14503
  misc_feature 1..36: note = Synthetic oligonucleotide
  source 1..36: mol_type = other DNA

SEQ ID NO: 30009 - DNA, 36 bp, synthetic construct; identical to SEQ ID NO: 14503
  misc_feature 1..36: note = Synthetic oligonucleotide
  source 1..36: mol_type = other DNA

SEQ ID NO: 30010 - DNA, 36 bp, synthetic construct; identical to SEQ ID NO: 14503
  misc_feature 1..36: note = Synthetic oligonucleotide
  source 1..36: mol_type = other DNA

SEQ ID NO: 30011 - DNA, 36 bp, synthetic construct; identical to SEQ ID NO: 14503
  misc_feature 1..36: note = Synthetic oligonucleotide
  source 1..36: mol_type = other DNA

SEQ ID NO: 30012 - DNA, 36 bp, synthetic construct; identical to SEQ ID NO: 14504
  misc_feature 1..36: note = Synthetic oligonucleotide
  source 1..36: mol_type = other DNA

SEQ ID NO: 30013 - DNA, 36 bp, synthetic construct; identical to SEQ ID NO: 14504
  misc_feature 1..36: note = Synthetic oligonucleotide
  source 1..36: mol_type = other DNA

SEQ ID NO: 30014 - DNA, 36 bp, synthetic construct; identical to SEQ ID NO: 14504
  misc_feature 1..36: note = Synthetic oligonucleotide
  source 1..36: mol_type = other DNA

SEQ ID NO: 30015 - DNA, 36 bp, synthetic construct; identical to SEQ ID NO: 14504
  misc_feature 1..36: note = Synthetic oligonucleotide
  source 1..36: mol_type = other DNA

SEQ ID NO: 30016 - DNA, 26 bp, synthetic construct
  misc_feature 1..26: note = Synthetic oligonucleotide
  source 1..26: mol_type = other DNA
gtttgattcccctacgaatttgcact

SEQ ID NO: 30017 - DNA, 26 bp, synthetic construct
  misc_feature 1..26: note = Synthetic oligonucleotide
  source 1..26: mol_type = other DNA
gtttgattcccctacgaatttgcact

SEQ ID NO: 30018 - DNA, 36 bp, synthetic construct
  misc_feature 1..36: note = Synthetic oligonucleotide
  source 1..36: mol_type = other DNA
gtttgattcccctacgaatttgcactactctcaaac

SEQ ID NO: 30019 - DNA, 36 bp, synthetic construct
  misc_feature 1..36: note = Synthetic oligonucleotide
  source 1..36: mol_type = other DNA
gtttgatttccattcaagattacaccattctcaaac

SEQ ID NO: 30020 - DNA, 29 bp, synthetic construct
  misc_feature 1..29: note = Synthetic oligonucleotide
  source 1..29: mol_type = other DNA
gtttgccccgcatgcgcggggatgatccg

SEQ ID NO: 30021 - DNA, 36 bp, synthetic construct
  misc_feature 1..36: note = Synthetic oligonucleotide
  source 1..36: mol_type = other DNA
gtttgcgagtagtgtaattctgtaaatctctaaaac

SEQ ID NO: 30022 - DNA, 36 bp, synthetic construct
  misc_feature 1..36: note = Synthetic oligonucleotide
  source 1..36: mol_type = other DNA
gtttgcgtcccttatgaaattacactactctcaaac

SEQ ID NO: 30023 - DNA, 36 bp, synthetic construct
  misc_feature 1..36: note = Synthetic oligonucleotide
  source 1..36: mol_type = other DNA
gtttggaagtagtgctatctgtgattacttctagac

SEQ ID NO: 30024 - DNA, 35 bp, synthetic construct
  misc_feature 1..35: note = Synthetic oligonucleotide
  source 1..35: mol_type = other DNA
gtttggaagtagtgctatctttaattactgctgaa

SEQ ID NO: 30025 - DNA, 36 bp, synthetic construct
  misc_feature 1..36: note = Synthetic oligonucleotide
  source 1..36: mol_type = other DNA
gtttggaagtagtgctatctttaattactgctgaac

SEQ ID NO: 30026 - DNA, 36 bp, synthetic construct
  misc_feature 1..36: note = Synthetic oligonucleotide
  source 1..36: mol_type = other DNA
gtttggatatatgccgtattaactcttattcaaact

SEQ ID NO: 30027 - DNA, 36 bp, synthetic construct; identical to SEQ ID NO: 30026
  misc_feature 1..36: note = Synthetic oligonucleotide
  source 1..36: mol_type = other DNA

SEQ ID NO: 30028 - DNA, 36 bp, synthetic construct; identical to SEQ ID NO: 30026
  misc_feature 1..36: note = Synthetic oligonucleotide
  source 1..36: mol_type = other DNA

SEQ ID NO: 30029 - DNA, 36 bp, synthetic construct; identical to SEQ ID NO: 30026
  misc_feature 1..36: note = Synthetic oligonucleotide
  source 1..36: mol_type = other DNA

SEQ ID NO: 30030 - DNA, 36 bp, synthetic construct
  misc_feature 1..36: note = Synthetic oligonucleotide
  source 1..36: mol_type = other DNA
gtttggctaccatatgaaattacactactctcaaac

SEQ ID NO: 30031 - DNA, 36 bp, synthetic construct; identical to SEQ ID NO: 14518
  misc_feature 1..36: note = Synthetic oligonucleotide
  source 1..36: mol_type = other DNA

SEQ ID NO: 30032 - DNA, 36 bp, synthetic construct
  misc_feature 1..36: note = Synthetic oligonucleotide
  source 1..36: mol_type = other DNA
gtttgggagtagtgctatctttaattacttttaaac

SEQ ID NO: 30033 - DNA, 36 bp, synthetic construct; identical to SEQ ID NO: 30032
  misc_feature 1..36: note = Synthetic oligonucleotide
  source 1..36: mol_type = other DNA

SEQ ID NO: 30034 - DNA, 36 bp, synthetic construct; identical to SEQ ID NO: 30032
  misc_feature 1..36: note = Synthetic oligonucleotide
  source 1..36: mol_type = other DNA

SEQ ID NO: 30035 - DNA, 36 bp, synthetic construct; identical to SEQ ID NO: 30032
  misc_feature 1..36: note = Synthetic oligonucleotide
  source 1..36: mol_type = other DNA

SEQ ID NO: 30036 - DNA, 36 bp, synthetic construct
  misc_feature 1..36: note = Synthetic oligonucleotide
  source 1..36: mol_type = other DNA
gtttgggagtagtgctatctttaattactttttaac

SEQ ID NO: 30037 - DNA, 35 bp, synthetic construct
  misc_feature 1..35: note = Synthetic oligonucleotide
  source 1..35: mol_type = other DNA
gtttgggagtagtgctatctttgattacttttaaa

SEQ ID NO: 30038 - DNA, 36 bp, synthetic construct; identical to SEQ ID NO: 14520
  misc_feature 1..36: note = Synthetic oligonucleotide
  source 1..36: mol_type = other DNA

SEQ ID NO: 30039 - DNA, 36 bp, synthetic construct
  misc_feature 1..36: note = Synthetic oligonucleotide
  source 1..36: mol_type = other DNA
gtttgggattgccccccgtccaagggatggcagaat

SEQ ID NO: 30040 - DNA, 36 bp, synthetic construct; identical to SEQ ID NO: 30039
  misc_feature 1..36: note = Synthetic oligonucleotide
  source 1..36: mol_type = other DNA

SEQ ID NO: 30041 - DNA, 36 bp, synthetic construct; identical to SEQ ID NO: 14521
  misc_feature 1..36: note = Synthetic oligonucleotide
  source 1..36: mol_type = other DNA

SEQ ID NO: 30042 - DNA, 36 bp, synthetic construct; identical to SEQ ID NO: 14522
  misc_feature 1..36: note = Synthetic oligonucleotide
  source 1..36: mol_type = other DNA

SEQ ID NO: 30043 - DNA, 36 bp, synthetic construct; identical to SEQ ID NO: 14524
  misc_feature 1..36: note = Synthetic oligonucleotide
  source 1..36: mol_type = other DNA

SEQ ID NO: 30044 - DNA, 36 bp, synthetic construct
  misc_feature 1..36: note = Synthetic oligonucleotide
  source 1..36: mol_type = other DNA
gtttggggatcctctggtttgacaacactctcaaac

SEQ ID NO: 30045 - DNA, 36 bp, synthetic construct
  misc_feature 1..36: note = Synthetic oligonucleotide
  source 1..36: mol_type = other DNA
gtttgggtatcattgaagattacactactctcaaac

SEQ ID NO: 30046 - DNA, 36 bp, synthetic construct; identical to SEQ ID NO: 30045
  misc_feature 1..36: note = Synthetic oligonucleotide
  source 1..36: mol_type = other DNA

SEQ ID NO: 30047 - DNA, 36 bp, synthetic construct
  misc_feature 1..36: note = Synthetic oligonucleotide
  source 1..36: mol_type = other DNA
gtttggttaccatcagaaacaacacaactctcaaac

SEQ ID NO: 30048 - DNA, 36 bp, synthetic construct; identical to SEQ ID NO: 30047
  misc_feature 1..36: note = Synthetic oligonucleotide
  source 1..36: mol_type = other DNA

SEQ ID NO: 30049 - DNA, 36 bp, synthetic construct; identical to SEQ ID NO: 30047
  misc_feature 1..36: note = Synthetic oligonucleotide
  source 1..36: mol_type = other DNA

SEQ ID NO: 30050 - DNA, 36 bp, synthetic construct
  misc_feature 1..36: note = Synthetic oligonucleotide
  source 1..36: mol_type = other DNA
gtttggttaccgttcaggataacacaatgctcaaac

SEQ ID NO: 30051 - DNA, 36 bp, synthetic construct
  misc_feature 1..36: note = Synthetic oligonucleotide
  source 1..36: mol_type = other DNA
gtttgtgtaccatacaattctacatcattctcaaac

SEQ ID NO: 30052 - DNA, 36 bp, synthetic construct
  misc_feature 1..36: note = Synthetic oligonucleotide
  source 1..36: mol_type = other DNA
gtttgttacccctatgaatttacaccgctctcaaac

SEQ ID NO: 30053 - DNA, 36 bp, synthetic construct; identical to SEQ ID NO: 30052
  misc_feature 1..36: note = Synthetic oligonucleotide
  source 1..36: mol_type = other DNA

SEQ ID NO: 30054 - DNA, 36 bp, synthetic construct
  misc_feature 1..36: note = Synthetic oligonucleotide
  source 1..36: mol_type = other DNA
gtttgttacccctatgaatttacactgctctcaaac

SEQ ID NO: 30055 - DNA, 36 bp, synthetic construct; identical to SEQ ID NO: 30054
  misc_feature 1..36: note = Synthetic oligonucleotide
  source 1..36: mol_type = other DNA

SEQ ID NO: 30056 - DNA, 36 bp, synthetic construct
  misc_feature 1..36: note = Synthetic oligonucleotide
  source 1..36: mol_type = other DNA
gtttgtttcccctacaaatttacactgctctcaaac

SEQ ID NO: 30057 - DNA, 36 bp, synthetic construct
  misc_feature 1..36: note = Synthetic oligonucleotide
  source 1..36: mol_type = other DNA
gtttgtttcccctacgaatttacactgctctcaaac

SEQ ID NO: 30058 - DNA, 36 bp, synthetic construct; identical to SEQ ID NO: 30057
  misc_feature 1..36: note = Synthetic oligonucleotide
  source 1..36: mol_type = other DNA

SEQ ID NO: 30059 - DNA, 36 bp, synthetic construct; identical to SEQ ID NO: 30057
  misc_feature 1..36: note = Synthetic oligonucleotide
  source 1..36: mol_type = other DNA

SEQ ID NO: 30060 - DNA, 36 bp, synthetic construct; identical to SEQ ID NO: 30057
  misc_feature 1..36: note = Synthetic oligonucleotide
  source 1..36: mol_type = other DNA

SEQ ID NO: 30061 - DNA, 36 bp, synthetic construct; identical to SEQ ID NO: 30057
  misc_feature 1..36: note = Synthetic oligonucleotide
  source 1..36: mol_type = other DNA

SEQ ID NO: 30062 - DNA, 36 bp, synthetic construct; identical to SEQ ID NO: 30057
  misc_feature 1..36: note = Synthetic oligonucleotide
  source 1..36: mol_type = other DNA

SEQ ID NO: 30063 - DNA, 36 bp, synthetic construct; identical to SEQ ID NO: 30057
  misc_feature 1..36: note = Synthetic oligonucleotide
  source 1..36: mol_type = other DNA

SEQ ID NO: 30064 - DNA, 36 bp, synthetic construct; identical to SEQ ID NO: 30057
  misc_feature 1..36: note = Synthetic oligonucleotide
  source 1..36: mol_type = other DNA

SEQ ID NO: 30065 - DNA, 36 bp, synthetic construct
  misc_feature 1..36: note = Synthetic oligonucleotide
  source 1..36: mol_type = other DNA
gttttaaagtactgtaaatctttattaatgtaaaac

SEQ ID NO: 30066 - DNA, 36 bp, synthetic construct
  misc_feature 1..36: note = Synthetic oligonucleotide
  source 1..36: mol_type = other DNA
gttttaacacccttcgtaattacacacctctcaaac

SEQ ID NO: 30067 - DNA, 36 bp, synthetic construct; identical to SEQ ID NO: 30066
  misc_feature 1..36: note = Synthetic oligonucleotide
  source 1..36: mol_type = other DNA

SEQ ID NO: 30068 - DNA, 36 bp, synthetic construct
  misc_feature 1..36: note = Synthetic oligonucleotide
  source 1..36: mol_type = other DNA
gttttaactacttacagaataacaagactctcaaac

SEQ ID NO: 30069 - DNA, 36 bp, synthetic construct
  misc_feature 1..36: note = Synthetic oligonucleotide
  source 1..36: mol_type = other DNA
gttttaagacccctacaaaccacaacctgttataat

SEQ ID NO: 30070 - DNA, 36 bp, synthetic construct
  misc_feature 1..36: note = Synthetic oligonucleotide
  source 1..36: mol_type = other DNA
gttttaagacccctacaaaccccattgtgataaaat

SEQ ID NO: 30071 - DNA, 36 bp, synthetic construct
  misc_feature 1..36: note = Synthetic oligonucleotide
  source 1..36: mol_type = other DNA
gttttaagacccctacatacccctatgtgatacaat

SEQ ID NO: 30072 - DNA, 36 bp, synthetic construct; identical to SEQ ID NO: 14537
  misc_feature 1..36: note = Synthetic oligonucleotide
  source 1..36: mol_type = other DNA

SEQ ID NO: 30073 - DNA, 36 bp, synthetic construct
  misc_feature 1..36: note = Synthetic oligonucleotide
  source 1..36: mol_type = other DNA
gttttaagtagatggtaaatcaataaggtcaagagc

SEQ ID NO: 30074 - DNA, 36 bp, synthetic construct
  misc_feature 1..36: note = Synthetic oligonucleotide
  source 1..36: mol_type = other DNA
gttttaataccatatgaaattacactattctcaaac

SEQ ID NO: 30075 - DNA, 36 bp, synthetic construct
  misc_feature 1..36: note = Synthetic oligonucleotide
  source 1..36: mol_type = other DNA
gttttaataccattcaaaataacatagatctaaaac

SEQ ID NO: 30076 - DNA, 36 bp, synthetic construct; identical to SEQ ID NO: 14541
  misc_feature 1..36: note = Synthetic oligonucleotide
  source 1..36: mol_type = other DNA

SEQ ID NO: 30077 - DNA, 36 bp, synthetic construct; identical to SEQ ID NO: 14542
  misc_feature 1..36: note = Synthetic oligonucleotide
  source 1..36: mol_type = other DNA

SEQ ID NO: 30078 - DNA, 36 bp, synthetic construct
  misc_feature 1..36: note = Synthetic oligonucleotide
  source 1..36: mol_type = other DNA
gttttaataccatttaagatgacataaatctaaaac

SEQ ID NO: 30079 - DNA, 36 bp, synthetic construct; identical to SEQ ID NO: 14543
  misc_feature 1..36: note = Synthetic oligonucleotide
  source 1..36: mol_type = other DNA

SEQ ID NO: 30080 - DNA, 36 bp, synthetic construct; identical to SEQ ID NO: 14543
  misc_feature 1..36: note = Synthetic oligonucleotide
  source 1..36: mol_type = other DNA

SEQ ID NO: 30081 - DNA, 36 bp, synthetic construct; identical to SEQ ID NO: 14546
  misc_feature 1..36: note = Synthetic oligonucleotide
  source 1..36: mol_type = other DNA

SEQ ID NO: 30082 - DNA, 36 bp, synthetic construct
  misc_feature 1..36: note = Synthetic oligonucleotide
  source 1..36: mol_type = other DNA
gttttaatacccctacaaacccctatgtgatacaat

SEQ ID NO: 30083 - DNA, 36 bp, synthetic construct; identical to SEQ ID NO: 14547
  misc_feature 1..36: note = Synthetic oligonucleotide
  source 1..36: mol_type = other DNA

SEQ ID NO: 30084 - DNA, 36 bp, synthetic construct; identical to SEQ ID NO: 14552
  misc_feature 1..36: note = Synthetic oligonucleotide
  source 1..36: mol_type = other DNA

SEQ ID NO: 30085 - DNA, 36 bp, synthetic construct
  misc_feature 1..36: note = Synthetic oligonucleotide
  source 1..36: mol_type = other DNA
gttttaatacccctataaactcctatgtgatatact

SEQ ID NO: 30086 - DNA, 36 bp, synthetic construct; identical to SEQ ID NO: 14554
  misc_feature 1..36: note = Synthetic oligonucleotide
  source 1..36: mol_type = other DNA

SEQ ID NO: 30087 - DNA, 36 bp, synthetic construct
  misc_feature 1..36: note = Synthetic oligonucleotide
  source 1..36: mol_type = other DNA
gttttaataccttatgaaattacactattctcaaac

SEQ ID NO: 30088 - DNA, 30 bp, synthetic construct
  misc_feature 1..30: note = Synthetic oligonucleotide
  source 1..30: mol_type = other DNA
gttttaatagatacatagtggaatgtaaat

SEQ ID NO: 30089 - DNA, 30 bp, synthetic construct; identical to SEQ ID NO: 30088
  misc_feature 1..30: note = Synthetic oligonucleotide
  source 1..30: mol_type = other DNA

SEQ ID NO: 30090 - DNA, 30 bp, synthetic construct; identical to SEQ ID NO: 30088
  misc_feature 1..30: note = Synthetic oligonucleotide
  source 1..30: mol_type = other DNA

SEQ ID NO: 30091 - DNA, 30 bp, synthetic construct; identical to SEQ ID NO: 30088
  misc_feature 1..30: note = Synthetic oligonucleotide
  source 1..30: mol_type = other DNA

SEQ ID NO: 30092 - DNA, 30 bp, synthetic construct; identical to SEQ ID NO: 30088
  misc_feature 1..30: note = Synthetic oligonucleotide
  source 1..30: mol_type = other DNA

SEQ ID NO: 30093 - DNA, 30 bp, synthetic construct; identical to SEQ ID NO: 30088
  misc_feature 1..30: note = Synthetic oligonucleotide
  source 1..30: mol_type = other DNA

SEQ ID NO: 30094 - DNA, 36 bp, synthetic construct
  misc_feature 1..36: note = Synthetic oligonucleotide
  source 1..36: mol_type = other DNA
gttttaatagcatttaagatgacataaatctaaaac

SEQ ID NO: 30095 - DNA, 35 bp, synthetic construct
  misc_feature 1..35: note = Synthetic oligonucleotide
  source 1..35: mol_type = other DNA
gttttaatcacacaaaaattacactactctcaaac

SEQ ID NO: 30096 - DNA, 36 bp, synthetic construct; identical to SEQ ID NO: 14555
  misc_feature 1..36: note = Synthetic oligonucleotide
  source 1..36: mol_type = other DNA

SEQ ID NO: 30097 - DNA, 36 bp, synthetic construct; identical to SEQ ID NO: 14555
  misc_feature 1..36: note = Synthetic oligonucleotide
  source 1..36: mol_type = other DNA

SEQ ID NO: 30098 - DNA, 36 bp, synthetic construct; identical to SEQ ID NO: 14555
  misc_feature 1..36: note = Synthetic oligonucleotide
  source 1..36: mol_type = other DNA

SEQ ID NO: 30099 - DNA, 37 bp, synthetic construct
  misc_feature 1..37: note = Synthetic oligonucleotide
  source 1..37: mol_type = other DNA
gttttaatctactttcaaatccccatttgatataatt

SEQ ID NO: 30100 - DNA, 36 bp, synthetic construct
  misc_feature 1..36: note = Synthetic oligonucleotide
  source 1..36: mol_type = other DNA
gttttacaatagcttaatttcttcaggtactaaaat

SEQ ID NO: 30101 - DNA, 36 bp, synthetic construct
  misc_feature 1..36: note = Synthetic oligonucleotide
  source 1..36: mol_type = other DNA
gttttacaatgacttaaatttttagggtactaaaac

SEQ ID NO: 30102 - DNA, 36 bp, synthetic construct
  misc_feature 1..36: note = Synthetic oligonucleotide
  source 1..36: mol_type = other DNA
gttttacaattataagaaatcacaaggttctcaaac

SEQ ID NO: 30103 - DNA, 36 bp, synthetic construct
  misc_feature 1..36: note = Synthetic oligonucleotide
  source 1..36: mol_type = other DNA
gttttacaccattacaaacttacaaggttctcaaac

SEQ ID NO: 30104 - DNA, 36 bp, synthetic construct; identical to SEQ ID NO: 30103
  misc_feature 1..36: note = Synthetic oligonucleotide
  source 1..36: mol_type = other DNA

SEQ ID NO: 30105 - DNA, 36 bp, synthetic construct; identical to SEQ ID NO: 30103
  misc_feature 1..36: note = Synthetic oligonucleotide
  source 1..36: mol_type = other DNA

SEQ ID NO: 30106 - DNA, 36 bp, synthetic construct; identical to SEQ ID NO: 30103
  misc_feature 1..36: note = Synthetic oligonucleotide
  source 1..36: mol_type = other DNA

SEQ ID NO: 30107 - DNA, 36 bp, synthetic construct; identical to SEQ ID NO: 14560
  misc_feature 1..36: note = Synthetic oligonucleotide
  source 1..36: mol_type = other DNA

SEQ ID NO: 30108 - DNA, 36 bp, synthetic construct
  misc_feature 1..36: note = Synthetic oligonucleotide
  source 1..36: mol_type = other DNA
gttttacacctttacaaacttacaaggttctcaaac

SEQ ID NO: 30109 - DNA, 36 bp, synthetic construct; identical to SEQ ID NO: 30108
  misc_feature 1..36: note = Synthetic oligonucleotide
  source 1..36: mol_type = other DNA

SEQ ID NO: 30110 - DNA, 36 bp, synthetic construct; identical to SEQ ID NO: 30108
  misc_feature 1..36: note = Synthetic oligonucleotide
  source 1..36: mol_type = other DNA

SEQ ID NO: 30111 - DNA, 36 bp, synthetic construct
  misc_feature 1..36: note = Synthetic oligonucleotide
  source 1..36: mol_type = other DNA
gttttacacctttattcacttacaaggttctcaaac

SEQ ID NO: 30112 - DNA, 36 bp, synthetic construct
  misc_feature 1..36: note = Synthetic oligonucleotide
  source 1..36: mol_type = other DNA
gttttacactaactcaaatcttccagttactaaaat

SEQ ID NO: 30113 - DNA, 36 bp, synthetic construct; identical to SEQ ID NO: 30112
  misc_feature 1..36: note = Synthetic oligonucleotide
  source 1..36: mol_type = other DNA

SEQ ID NO: 30114 - DNA, 36 bp, synthetic construct; identical to SEQ ID NO: 30112
  misc_feature 1..36: note = Synthetic oligonucleotide
  source 1..36: mol_type = other DNA

SEQ ID NO: 30115 - DNA, 36 bp, synthetic construct; identical to SEQ ID NO: 30112
  misc_feature 1..36: note = Synthetic oligonucleotide
  source 1..36: mol_type = other DNA

SEQ ID NO: 30116 - DNA, 36 bp, synthetic construct; identical to SEQ ID NO: 14563
  misc_feature 1..36: note = Synthetic oligonucleotide
  source 1..36: mol_type = other DNA

SEQ ID NO: 30117 - DNA, 36 bp, synthetic construct; identical to SEQ ID NO: 14563
  misc_feature 1..36: note = Synthetic oligonucleotide
  source 1..36: mol_type = other DNA

SEQ ID NO: 30118 - DNA, 36 bp, synthetic construct
  misc_feature 1..36: note = Synthetic oligonucleotide
  source 1..36: mol_type = other DNA
gttttacactcttctgaattaacaaagtcctcaaac

SEQ ID NO: 30119 - DNA, 36 bp, synthetic construct
  misc_feature 1..36: note = Synthetic oligonucleotide
  source 1..36: mol_type = other DNA
gttttacactcttcttaacttacaaggttctcaaac

SEQ ID NO: 30120 - DNA, 36 bp, synthetic construct
  misc_feature 1..36: note = Synthetic oligonucleotide
  source 1..36: mol_type = other DNA
gttttacagtagtgttatattgaaaggcactgaaac

SEQ ID NO: 30121 - DNA, 36 bp, synthetic construct; identical to SEQ ID NO: 14567
  misc_feature 1..36: note = Synthetic oligonucleotide
  source 1..36: mol_type = other DNA

SEQ ID NO: 30122 - DNA, 36 bp, synthetic construct; identical to SEQ ID NO: 14567
  misc_feature 1..36: note = Synthetic oligonucleotide
  source 1..36: mol_type = other DNA

SEQ ID NO: 30123 - DNA, 36 bp, synthetic construct; identical to SEQ ID NO: 14567
  misc_feature 1..36: note = Synthetic oligonucleotide
  source 1..36: mol_type = other DNA

SEQ ID NO: 30124 - DNA, 36 bp, synthetic construct; identical to SEQ ID NO: 14567
  misc_feature 1..36: note = Synthetic oligonucleotide
  source 1..36: mol_type = other DNA

SEQ ID NO: 30125 - DNA, 36 bp, synthetic construct; identical to SEQ ID NO: 14567
  misc_feature 1..36: note = Synthetic oligonucleotide
  source 1..36: mol_type = other DNA

SEQ ID NO: 30126 - DNA, 36 bp, synthetic construct; identical to SEQ ID NO: 14567
  misc_feature 1..36: note = Synthetic oligonucleotide
  source 1..36: mol_type = other DNA

SEQ ID NO: 30127 - DNA, 36 bp, synthetic construct; identical to SEQ ID NO: 14567
  misc_feature 1..36: note = Synthetic oligonucleotide
  source 1..36: mol_type = other DNA

SEQ ID NO: 30128 - DNA, 36 bp, synthetic construct; identical to SEQ ID NO: 14567
  misc_feature 1..36: note = Synthetic oligonucleotide
  source 1..36: mol_type = other DNA

SEQ ID NO: 30129 - DNA, 36 bp, synthetic construct; identical to SEQ ID NO: 14567
  misc_feature 1..36: note = Synthetic oligonucleotide
  source 1..36: mol_type = other DNA

SEQ ID NO: 30130 - DNA, 36 bp, synthetic construct
  misc_feature 1..36: note = Synthetic oligonucleotide
  source 1..36: mol_type = other DNA
gttttacagtagtgttatattgaatagtactgaaat

SEQ ID NO: 30131 - DNA, 36 bp, synthetic construct; identical to SEQ ID NO: 14568
  misc_feature 1..36: note = Synthetic oligonucleotide
  source 1..36: mol_type = other DNA

SEQ ID NO: 30132 - DNA, 36 bp, synthetic construct; identical to SEQ ID NO: 14568
  misc_feature 1..36: note = Synthetic oligonucleotide
  source 1..36: mol_type = other DNA

SEQ ID NO: 30133 - DNA, 36 bp, synthetic construct; identical to SEQ ID NO: 14568
  misc_feature 1..36: note = Synthetic oligonucleotide
  source 1..36: mol_type = other DNA

SEQ ID NO: 30134 - DNA, 36 bp, synthetic construct; identical to SEQ ID NO: 14568
  misc_feature 1..36: note = Synthetic oligonucleotide
  source 1..36: mol_type = other DNA

SEQ ID NO: 30135 - DNA, 36 bp, synthetic construct; identical to SEQ ID NO: 14568
  misc_feature 1..36: note = Synthetic oligonucleotide
  source 1..36: mol_type = other DNA

SEQ ID NO: 30136 - DNA, 36 bp, synthetic construct; identical to SEQ ID NO: 14568
  misc_feature 1..36: note = Synthetic oligonucleotide
  source 1..36: mol_type = other DNA

SEQ ID NO: 30137 - DNA, 36 bp, synthetic construct; identical to SEQ ID NO: 14568
  misc_feature 1..36: note = Synthetic oligonucleotide
  source 1..36: mol_type = other DNA

SEQ ID NO: 30138 - DNA, 36 bp, synthetic construct; identical to SEQ ID NO: 14568
  misc_feature 1..36: note = Synthetic oligonucleotide
  source 1..36: mol_type = other DNA

SEQ ID NO: 30139 - DNA, 36 bp, synthetic construct
  misc_feature 1..36: note = Synthetic oligonucleotide
  source 1..36: mol_type = other DNA
gttttacagtcacataatttatctaggtactaaaat

SEQ ID NO: 30140 - DNA, 36 bp, synthetic construct
  misc_feature 1..36: note = Synthetic oligonucleotide
  source 1..36: mol_type = other DNA
gttttacagtcacgtaaattattcagttactaaaat

SEQ ID NO: 30141 - DNA, 36 bp, synthetic construct; identical to SEQ ID NO: 30140
  misc_feature 1..36: note = Synthetic oligonucleotide
  source 1..36: mol_type = other DNA

SEQ ID NO: 30142 - DNA, 36 bp, synthetic construct; identical to SEQ ID NO: 30140
  misc_feature 1..36: note = Synthetic oligonucleotide
  source 1..36: mol_type = other DNA

SEQ ID NO: 30143 - DNA, 36 bp, synthetic construct; identical to SEQ ID NO: 30140
  misc_feature 1..36: note = Synthetic oligonucleotide
  source 1..36: mol_type = other DNA

SEQ ID NO: 30144 - DNA, 36 bp, synthetic construct; identical to SEQ ID NO: 30140
  misc_feature 1..36: note = Synthetic oligonucleotide
  source 1..36: mol_type = other DNA

SEQ ID NO: 30145 - DNA, 36 bp, synthetic construct; identical to SEQ ID NO: 30140
  misc_feature 1..36: note = Synthetic oligonucleotide
  source 1..36: mol_type = other DNA

SEQ ID NO: 30146 - DNA, 36 bp, synthetic construct; identical to SEQ ID NO: 30140
  misc_feature 1..36: note = Synthetic oligonucleotide
  source 1..36: mol_type = other DNA

SEQ ID NO: 30147 - DNA, 36 bp, synthetic construct
  misc_feature 1..36: note = Synthetic oligonucleotide
  source 1..36: mol_type = other DNA
gttttacagtcacgtaatttgttcaggtactaaaat

SEQ ID NO: 30148 - DNA, 36 bp, synthetic construct; identical to SEQ ID NO: 30147
  misc_feature 1..36: note = Synthetic oligonucleotide
  source 1..36: mol_type = other DNA

SEQ ID NO: 30149 - DNA, 36 bp, synthetic construct
  misc_feature 1..36: note = Synthetic oligonucleotide
  source 1..36: mol_type = other DNA
gttttacagtcacgtaatttgtttaggtaccaaaat

SEQ ID NO: 30150 - DNA, 36 bp, synthetic construct
  misc_feature 1..36: note = Synthetic oligonucleotide
  source 1..36: mol_type = other DNA
gttttacagtcacgtaatttgtttaggtactaaaat

SEQ ID NO: 30151 - DNA, 36 bp, synthetic construct; identical to SEQ ID NO: 30150
  misc_feature 1..36: note = Synthetic oligonucleotide
  source 1..36: mol_type = other DNA

SEQ ID NO: 30152 - DNA, 36 bp, synthetic construct; identical to SEQ ID NO: 30150
  misc_feature 1..36: note = Synthetic oligonucleotide
  source 1..36: mol_type = other DNA

SEQ ID NO: 30153 - DNA, 36 bp, synthetic construct; identical to SEQ ID NO: 30150
  misc_feature 1..36: note = Synthetic oligonucleotide
  source 1..36: mol_type = other DNA

SEQ ID NO: 30154 - DNA, 36 bp, synthetic construct; identical to SEQ ID NO: 30150
  misc_feature 1..36: note = Synthetic oligonucleotide
  source 1..36: mol_type = other DNA

SEQ ID NO: 30155 - DNA, 36 bp, synthetic construct; identical to SEQ ID NO: 30150
  misc_feature 1..36: note = Synthetic oligonucleotide
  source 1..36: mol_type = other DNA

SEQ ID NO: 30156 - DNA, 36 bp, synthetic construct; identical to SEQ ID NO: 30150
  misc_feature 1..36: note = Synthetic oligonucleotide
  source 1..36: mol_type = other DNA

SEQ ID NO: 30157 - DNA, 36 bp, synthetic construct; identical to SEQ ID NO: 30150
  misc_feature 1..36: note = Synthetic oligonucleotide
  source 1..36: mol_type = other DNA

SEQ ID NO: 30158 - DNA, 36 bp, synthetic construct; identical to SEQ ID NO: 30150
  misc_feature 1..36: note = Synthetic oligonucleotide
  source 1..36: mol_type = other DNA

SEQ ID NO: 30159 - DNA, 36 bp, synthetic construct; identical to SEQ ID NO: 30150
  misc_feature 1..36: note = Synthetic oligonucleotide
  source 1..36: mol_type = other DNA

SEQ ID NO: 30160 - DNA, 36 bp, synthetic construct; identical to SEQ ID NO: 30150
  misc_feature 1..36: note = Synthetic oligonucleotide
  source 1..36: mol_type = other DNA

SEQ ID NO: 30161 - DNA, 36 bp, synthetic construct; identical to SEQ ID NO: 30150
  misc_feature 1..36: note = Synthetic oligonucleotide
  source 1..36: mol_type = other DNA

SEQ ID NO: 30162 - DNA, 36 bp, synthetic construct; identical to SEQ ID NO: 30150
  misc_feature 1..36: note = Synthetic oligonucleotide
  source 1..36: mol_type = other DNA

SEQ ID NO: 30163 - DNA, 36 bp, synthetic construct; identical to SEQ ID NO: 30150
  misc_feature 1..36: note = Synthetic oligonucleotide
  source 1..36: mol_type = other DNA

SEQ ID NO: 30164 - DNA, 36 bp, synthetic construct; identical to SEQ ID NO: 30150
  misc_feature 1..36: note = Synthetic oligonucleotide
  source 1..36: mol_type = other DNA

SEQ ID NO: 30165 - DNA, 36 bp, synthetic construct; identical to SEQ ID NO: 14570
  misc_feature 1..36: note = Synthetic oligonucleotide
  source 1..36: mol_type = other DNA

SEQ ID NO: 30166 - DNA, 36 bp, synthetic construct
  misc_feature 1..36: note = Synthetic oligonucleotide
  source 1..36: mol_type = other DNA
gttttacatacttattgatttacaaggttctcaaac

SEQ ID NO: 30167 - DNA, 36 bp, synthetic construct; identical to SEQ ID NO: 30166
  misc_feature 1..36: note = Synthetic oligonucleotide
  source 1..36: mol_type = other DNA

SEQ ID NO: 30168 - DNA, 36 bp, synthetic construct; identical to SEQ ID NO: 30166
  misc_feature 1..36: note = Synthetic oligonucleotide
  source 1..36: mol_type = other DNA

SEQ ID NO: 30169 - DNA, 36 bp, synthetic construct
  misc_feature 1..36: note = Synthetic oligonucleotide
  source 1..36: mol_type = other DNA
gttttacatcaatcaagaattaccttactctaaaac

SEQ ID NO: 30170 - DNA, 36 bp, synthetic construct
  misc_feature 1..36: note = Synthetic oligonucleotide
  source 1..36: mol_type = other DNA
gttttacatccttctaaattaacaaagctctcaaac

SEQ ID NO: 30171 - DNA, 36 bp, synthetic construct; identical to SEQ ID NO: 30170
  misc_feature 1..36: note = Synthetic oligonucleotide
  source 1..36: mol_type = other DNA

SEQ ID NO: 30172 - DNA, 36 bp, synthetic construct
  misc_feature 1..36: note = Synthetic oligonucleotide
  source 1..36: mol_type = other DNA
gttttacatccttttgaattaacaaagctctcaaac

SEQ ID NO: 30173 - DNA, 36 bp, synthetic construct; identical to SEQ ID NO: 30172
  misc_feature 1..36: note = Synthetic oligonucleotide
  source 1..36: mol_type = other DNA

SEQ ID NO: 30174 - DNA, 36 bp, synthetic construct
  misc_feature 1..36: note = Synthetic oligonucleotide
  source 1..36: mol_type = other DNA
gttttacatcttcctgaattagcaaagctctcaaac

SEQ ID NO: 30175 - DNA, 36 bp, synthetic construct; identical to SEQ ID NO: 30174
  misc_feature 1..36: note = Synthetic oligonucleotide
  source 1..36: mol_type = other DNA

SEQ ID NO: 30176 - DNA, 36 bp, synthetic construct
  misc_feature 1..36: note = Synthetic oligonucleotide
  source 1..36: mol_type = other DNA
gttttacatctttctgaattaacaaagctctcaaac

SEQ ID NO: 30177 - DNA, 36 bp, synthetic construct; identical to SEQ ID NO: 30176
  misc_feature 1..36: note = Synthetic oligonucleotide
  source 1..36: mol_type = other DNA

SEQ ID NO: 30178 - DNA, 36 bp, synthetic construct; identical to SEQ ID NO: 30176
  misc_feature 1..36: note = Synthetic oligonucleotide
  source 1..36: mol_type = other DNA

SEQ ID NO: 30179 - DNA, 36 bp, synthetic construct; identical to SEQ ID NO: 30176
  misc_feature 1..36: note = Synthetic oligonucleotide
  source 1..36: mol_type = other DNA

SEQ ID NO: 30180 - DNA, 36 bp, synthetic construct; identical to SEQ ID NO: 30176
  misc_feature 1..36: note = Synthetic oligonucleotide
  source 1..36: mol_type = other DNA

SEQ ID NO: 30181 - DNA, 36 bp, synthetic construct; identical to SEQ ID NO: 30176
  misc_feature 1..36: note = Synthetic oligonucleotide
  source 1..36: mol_type = other DNA

SEQ ID NO: 30182 - DNA, 36 bp, synthetic construct; identical to SEQ ID NO: 30176
  misc_feature 1..36: note = Synthetic oligonucleotide
  source 1..36: mol_type = other DNA

SEQ ID NO: 30183 - DNA, 36 bp, synthetic construct; identical to SEQ ID NO: 30176
  misc_feature 1..36: note = Synthetic oligonucleotide
  source 1..36: mol_type = other DNA

SEQ ID NO: 30184 - DNA, 36 bp, synthetic construct; identical to SEQ ID NO: 30176
  misc_feature 1..36: note = Synthetic oligonucleotide
  source 1..36: mol_type = other DNA

SEQ ID NO: 30185 - DNA, 36 bp, synthetic construct; identical to SEQ ID NO: 30176
  misc_feature 1..36: note = Synthetic oligonucleotide
  source 1..36: mol_type = other DNA

SEQ ID NO: 30186 - DNA, 36 bp, synthetic construct; identical to SEQ ID NO: 30176
  misc_feature 1..36: note = Synthetic oligonucleotide
  source 1..36: mol_type = other DNA

SEQ ID NO: 30187 - DNA, 36 bp, synthetic construct
  misc_feature 1..36: note = Synthetic oligonucleotide
  source 1..36: mol_type = other DNA
gttttacattaataaagatttacagtactttaaaac

SEQ ID NO: 30188 - DNA, 36 bp, synthetic construct; identical to SEQ ID NO: 30187
  misc_feature 1..36: note = Synthetic oligonucleotide
  source 1..36: mol_type = other DNA

SEQ ID NO: 30189 - DNA, 36 bp, synthetic construct
  misc_feature 1..36: note = Synthetic oligonucleotide
  source 1..36: mol_type = other DNA
gttttaccaccatacaggattgcaccattctcaaac

SEQ ID NO: 30190 - DNA, 36 bp, synthetic construct
  misc_feature 1..36: note = Synthetic oligonucleotide
  source 1..36: mol_type = other DNA
gttttaccactatctggaattacatcactctcaaac

SEQ ID NO: 30191 - DNA, 36 bp, synthetic construct; identical to SEQ ID NO: 30190
  misc_feature 1..36: note = Synthetic oligonucleotide
  source 1..36: mol_type = other DNA

SEQ ID NO: 30192 - DNA, 36 bp, synthetic construct; identical to SEQ ID NO: 30190
  misc_feature 1..36: note = Synthetic oligonucleotide
  source 1..36: mol_type = other DNA

SEQ ID NO: 30193 - DNA, 36 bp, synthetic construct; identical to SEQ ID NO: 30190
  misc_feature 1..36: note = Synthetic oligonucleotide
  source 1..36: mol_type = other DNA

SEQ ID NO: 30194 - DNA, 36 bp, synthetic construct; identical to SEQ ID NO: 30190
  misc_feature 1..36: note = Synthetic oligonucleotide
  source 1..36: mol_type = other DNA

SEQ ID NO: 30195 - DNA, 36 bp, synthetic construct; identical to SEQ ID NO: 30190
  misc_feature 1..36: note = Synthetic oligonucleotide
  source 1..36: mol_type = other DNA

SEQ ID NO: 30196 - DNA, 36 bp, synthetic construct; identical to SEQ ID NO: 30190
  misc_feature 1..36: note = Synthetic oligonucleotide
  source 1..36: mol_type = other DNA

SEQ ID NO: 30197 - DNA, 36 bp, synthetic construct; identical to SEQ ID NO: 30190
  misc_feature 1..36: note = Synthetic oligonucleotide
  source 1..36: mol_type = other DNA

SEQ ID NO: 30198 - DNA, 36 bp, synthetic construct
  misc_feature 1..36: note = Synthetic oligonucleotide
  source 1..36: mol_type = other DNA
gttttaccataccaagaactgctagggaactacaac

SEQ ID NO: 30199 - DNA, 37 bp, synthetic construct
  misc_feature 1..37: note = Synthetic oligonucleotide
  source 1..37: mol_type = other DNA
gttttaccataccaagaactgctagggaactacaact

SEQ ID NO: 30200 - DNA, 36 bp, synthetic construct
  misc_feature 1..36: note = Synthetic oligonucleotide
  source 1..36: mol_type = other DNA
gttttaccattctatgaatttacattactctcaaac

SEQ ID NO: 30201 - DNA, 36 bp, synthetic construct
  misc_feature 1..36: note = Synthetic oligonucleotide
  source 1..36: mol_type = other DNA
gttttacgataactcaaattgtccaggtactaaaat

SEQ ID NO: 30202 - DNA, 36 bp, synthetic construct
  misc_feature 1..36: note = Synthetic oligonucleotide
  source 1..36: mol_type = other DNA
gttttacgataacttaattatttcaggtactaaaat

SEQ ID NO: 30203 - DNA, 36 bp, synthetic construct; identical to SEQ ID NO: 14581
  misc_feature 1..36: note = Synthetic oligonucleotide
  source 1..36: mol_type = other DNA

SEQ ID NO: 30204 - DNA, 36 bp, synthetic construct; identical to SEQ ID NO: 14581
  misc_feature 1..36: note = Synthetic oligonucleotide
  source 1..36: mol_type = other DNA

SEQ ID NO: 30205 - DNA, 36 bp, synthetic construct
  misc_feature 1..36: note = Synthetic oligonucleotide
  source 1..36: mol_type = other DNA
gttttacggtcacgtaatttgtttaggtactaaaat

SEQ ID NO: 30206 - DNA, 36 bp, synthetic construct; identical to SEQ ID NO: 30205
  misc_feature 1..36: note = Synthetic oligonucleotide
  source 1..36: mol_type = other DNA

SEQ ID NO: 30207 - DNA, 36 bp, synthetic construct; identical to SEQ ID NO: 30205
  misc_feature 1..36: note = Synthetic oligonucleotide
  source 1..36: mol_type = other DNA

SEQ ID NO: 30208 - DNA, 36 bp, synthetic construct; identical to SEQ ID NO: 14583
  misc_feature 1..36: note = Synthetic oligonucleotide
  source 1..36: mol_type = other DNA

SEQ ID NO: 30209 - DNA, 36 bp, synthetic construct; identical to SEQ ID NO: 14583
  misc_feature 1..36: note = Synthetic oligonucleotide
  source 1..36: mol_type = other DNA

SEQ ID NO: 30210 - DNA, 36 bp, synthetic construct; identical to SEQ ID NO: 14584
  misc_feature 1..36: note = Synthetic oligonucleotide
  source 1..36: mol_type = other DNA

SEQ ID NO: 30211 - DNA, 36 bp, synthetic construct; identical to SEQ ID NO: 14584
  misc_feature 1..36: note = Synthetic oligonucleotide
  source 1..36: mol_type = other DNA

SEQ ID NO: 30212 - DNA, 36 bp, synthetic construct; identical to SEQ ID NO: 14584
  misc_feature 1..36: note = Synthetic oligonucleotide
  source 1..36: mol_type = other DNA

SEQ ID NO: 30213 - DNA, 36 bp, synthetic construct
  misc_feature 1..36: note = Synthetic oligonucleotide
  source 1..36: mol_type = other DNA
gttttactacattatgaaattacactattctcaaac

SEQ ID NO: 30214 - DNA, 36 bp, synthetic construct; identical to SEQ ID NO: 30213
  misc_feature 1..36: note = Synthetic oligonucleotide
  source 1..36: mol_type = other DNA

SEQ ID NO: 30215 - DNA, 36 bp, synthetic construct; identical to SEQ ID NO: 30213
  misc_feature 1..36: note = Synthetic oligonucleotide
  source 1..36: mol_type = other DNA

SEQ ID NO: 30216 - DNA, 36 bp, synthetic construct; identical to SEQ ID NO: 14585
  misc_feature 1..36: note = Synthetic oligonucleotide
  source 1..36: mol_type = other DNA

SEQ ID NO: 30217 - DNA, 36 bp, synthetic construct; identical to SEQ ID NO: 14585
  misc_feature 1..36: note = Synthetic oligonucleotide
  source 1..36: mol_type = other DNA

SEQ ID NO: 30218 - DNA, 36 bp, synthetic construct; identical to SEQ ID NO: 14585
  misc_feature 1..36: note = Synthetic oligonucleotide
  source 1..36: mol_type = other DNA

SEQ ID NO: 30219 - DNA, 36 bp, synthetic construct; identical to SEQ ID NO: 14585
  misc_feature 1..36: note = Synthetic oligonucleotide
  source 1..36: mol_type = other DNA

SEQ ID NO: 30220 - DNA, 36 bp, synthetic construct
  misc_feature 1..36: note = Synthetic oligonucleotide
  source 1..36: mol_type = other DNA
gttttactaccacttaggattacactactctcaaac

SEQ ID NO: 30221 - DNA, 36 bp, synthetic construct
  misc_feature 1..36: note = Synthetic oligonucleotide
  source 1..36: mol_type = other DNA
gttttactaccacttgggattacactactctcaaac

SEQ ID NO: 30222 - DNA, 36 bp, synthetic construct; identical to SEQ ID NO: 30221
  misc_feature 1..36: note = Synthetic oligonucleotide
  source 1..36: mol_type = other DNA

SEQ ID NO: 30223 - DNA, 36 bp, synthetic construct; identical to SEQ ID NO: 30221
  misc_feature 1..36: note = Synthetic oligonucleotide
  source 1..36: mol_type = other DNA

SEQ ID NO: 30224 - DNA, 36 bp, synthetic construct; identical to SEQ ID NO: 30221
  misc_feature 1..36: note = Synthetic oligonucleotide
  source 1..36: mol_type = other DNA

SEQ ID NO: 30225 - DNA, 36 bp, synthetic construct; identical to SEQ ID NO: 30221
  misc_feature 1..36: note = Synthetic oligonucleotide
  source 1..36: mol_type = other DNA

SEQ ID NO: 30226 - DNA, 36 bp, synthetic construct; identical to SEQ ID NO: 30221
  misc_feature 1..36: note = Synthetic oligonucleotide
  source 1..36: mol_type = other DNA

SEQ ID NO: 30227 - DNA, 36 bp, synthetic construct; identical to SEQ ID NO: 30221
  misc_feature 1..36: note = Synthetic oligonucleotide
  source 1..36: mol_type = other DNA

SEQ ID NO: 30228 - DNA, 36 bp, synthetic construct; identical to SEQ ID NO: 14590
  misc_feature 1..36: note = Synthetic oligonucleotide
  source 1..36: mol_type = other DNA

SEQ ID NO: 30229 - DNA, 36 bp, synthetic construct; identical to SEQ ID NO: 14590
  misc_feature 1..36: note = Synthetic oligonucleotide
  source 1..36: mol_type = other DNA

SEQ ID NO: 30230 - DNA, 36 bp, synthetic construct; identical to SEQ ID NO: 14590
  misc_feature 1..36: note = Synthetic oligonucleotide
  source 1..36: mol_type = other DNA

SEQ ID NO: 30231 - DNA, 36 bp, synthetic construct; identical to SEQ ID NO: 14590
  misc_feature 1..36: note = Synthetic oligonucleotide
  source 1..36: mol_type = other DNA

SEQ ID NO: 30232 - DNA, 36 bp, synthetic construct; identical to SEQ ID NO: 14593
  misc_feature 1..36: note = Synthetic oligonucleotide
  source 1..36: mol_type = other DNA

SEQ ID NO: 30233 - DNA, 36 bp, synthetic construct
  misc_feature 1..36: note = Synthetic oligonucleotide
  source 1..36: mol_type = other DNA
gttttactaccatttagaatgtcacgaccctaaaac

SEQ ID NO: 30234 - DNA, 36 bp, synthetic construct
  misc_feature 1..36: note = Synthetic oligonucleotide
  source 1..36: mol_type = other DNA
gttttactaccccataaaattacactactctcaaac

SEQ ID NO: 30235 - DNA, 36 bp, synthetic construct; identical to SEQ ID NO: 30234
  misc_feature 1..36: note = Synthetic oligonucleotide
  source 1..36: mol_type = other DNA

SEQ ID NO: 30236 - DNA, 36 bp, synthetic construct; identical to SEQ ID NO: 14595
  misc_feature 1..36: note = Synthetic oligonucleotide
  source 1..36: mol_type = other DNA

SEQ ID NO: 30237 - DNA, 36 bp, synthetic construct; identical to SEQ ID NO: 14595
  misc_feature 1..36: note = Synthetic oligonucleotide
  source 1..36: mol_type = other DNA

SEQ ID NO: 30238 - DNA, 36 bp, synthetic construct; identical to SEQ ID NO: 14595
  misc_feature 1..36: note = Synthetic oligonucleotide
  source 1..36: mol_type = other DNA

SEQ ID NO: 30239 - DNA, 36 bp, synthetic construct; identical to SEQ ID NO: 14595
  misc_feature 1..36: note = Synthetic oligonucleotide
  source 1..36: mol_type = other DNA

SEQ ID NO: 30240 - DNA, 37 bp, synthetic construct
  misc_feature 1..37: note = Synthetic oligonucleotide
  source 1..37: mol_type = other DNA
gttttactaccctataaaattacactactctcaaacc

SEQ ID NO: 30241 - DNA, 37 bp, synthetic construct; identical to SEQ ID NO: 30240
  misc_feature 1..37: note = Synthetic oligonucleotide
  source 1..37: mol_type = other DNA

SEQ ID NO: 30242 - DNA, 36 bp, synthetic construct
  misc_feature 1..36: note = Synthetic oligonucleotide
  source 1..36: mol_type = other DNA
gttttactaccctataaatttacactactctcaaac

SEQ ID NO: 30243 - DNA, 36 bp, synthetic construct; identical to SEQ ID NO: 30242
  misc_feature 1..36: note = Synthetic oligonucleotide
  source 1..36: mol_type = other DNA

SEQ ID NO: 30244 - DNA, 36 bp, synthetic construct; identical to SEQ ID NO: 30242
  misc_feature 1..36: note = Synthetic oligonucleotide
  source 1..36: mol_type = other DNA

SEQ ID NO: 30245 - DNA, 36 bp, synthetic construct; identical to SEQ ID NO: 30242
  misc_feature 1..36: note = Synthetic oligonucleotide
  source 1..36: mol_type = other DNA

SEQ ID NO: 30246 - DNA, 36 bp, synthetic construct; identical to SEQ ID NO: 30242
  misc_feature 1..36: note = Synthetic oligonucleotide
  source 1..36: mol_type = other DNA

SEQ ID NO: 30247 - DNA, 36 bp, synthetic construct; identical to SEQ ID NO: 30242
  misc_feature 1..36: note = Synthetic oligonucleotide
  source 1..36: mol_type = other DNA

SEQ ID NO: 30248 - DNA, 36 bp, synthetic construct; identical to SEQ ID NO: 30242
  misc_feature 1..36: note = Synthetic oligonucleotide
  source 1..36: mol_type = other DNA

SEQ ID NO: 30249 - DNA, 36 bp, synthetic construct; identical to SEQ ID NO: 30242
  misc_feature 1..36: note = Synthetic oligonucleotide
  source 1..36: mol_type = other DNA

SEQ ID NO: 30250 - DNA, 36 bp, synthetic construct
  misc_feature 1..36: note = Synthetic oligonucleotide
  source 1..36: mol_type = other DNA
gttttactaccctataaatttacactattctcaaac

SEQ ID NO: 30251 - DNA, 36 bp, synthetic construct; identical to SEQ ID NO: 14596
  misc_feature 1..36: note = Synthetic oligonucleotide
  source 1..36: mol_type = other DNA

SEQ ID NO: 30252 - DNA, 36 bp, synthetic construct; identical to SEQ ID NO: 14596
  misc_feature 1..36: note = Synthetic oligonucleotide
  source 1..36: mol_type = other DNA

SEQ ID NO: 30253 - DNA, 37 bp, synthetic construct
  misc_feature 1..37: note = Synthetic oligonucleotide
  source 1..37: mol_type = other DNA
gttttactaccctatgaatttacactactccaaaacc

SEQ ID NO: 30254 - DNA, 36 bp, synthetic construct
  misc_feature 1..36: note = Synthetic oligonucleotide
  source 1..36: mol_type = other DNA
gttttactaccctctaaaataacactactctcaaac

SEQ ID NO: 30255 - DNA, 36 bp, synthetic construct; identical to SEQ ID NO: 30254
  misc_feature 1..36: note = Synthetic oligonucleotide
  source 1..36: mol_type = other DNA

SEQ ID NO: 30256 - DNA, 20 bp, synthetic construct
  misc_feature 1..20: note = Synthetic oligonucleotide
  source 1..20: mol_type = other DNA
gttttactaccttacgaaat

SEQ ID NO: 30257 - DNA, 36 bp, synthetic construct; identical to SEQ ID NO: 14597
  misc_feature 1..36: note = Synthetic oligonucleotide
  source 1..36: mol_type = other DNA

SEQ ID NO: 30258 - DNA, 36 bp, synthetic construct; identical to SEQ ID NO: 14597
  misc_feature 1..36: note = Synthetic oligonucleotide
  source 1..36: mol_type = other DNA

SEQ ID NO: 30259 - DNA, 36 bp, synthetic construct; identical to SEQ ID NO: 14597
  misc_feature 1..36: note = Synthetic oligonucleotide
  source 1..36: mol_type = other DNA

SEQ ID NO: 30260 - DNA, 36 bp, synthetic construct; identical to SEQ ID NO: 14597
  misc_feature 1..36: note = Synthetic oligonucleotide
  source 1..36: mol_type = other DNA

SEQ ID NO: 30261 - DNA, 36 bp, synthetic construct; identical to SEQ ID NO: 14597
  misc_feature 1..36: note = Synthetic oligonucleotide
  source 1..36: mol_type = other DNA

SEQ ID NO: 30262 - DNA, 36 bp, synthetic construct; identical to SEQ ID NO: 14597
  misc_feature 1..36: note = Synthetic oligonucleotide
  source 1..36: mol_type = other DNA

SEQ ID NO: 30263 - DNA, 36 bp, synthetic construct; identical to SEQ ID NO: 14597
  misc_feature 1..36: note = Synthetic oligonucleotide
  source 1..36: mol_type = other DNA

SEQ ID NO: 30264 - DNA, 36 bp, synthetic construct
  misc_feature 1..36: note = Synthetic oligonucleotide
  source 1..36: mol_type = other DNA
gttttactaccttataaaattacactactctcaaac

SEQ ID NO: 30265 - DNA, 37 bp, synthetic construct
  misc_feature 1..37: note = Synthetic oligonucleotide
  source 1..37: mol_type = other DNA
gttttactaccttataaaattacactactctcaaacc

SEQ ID NO: 30266 - DNA, 36 bp, synthetic construct; identical to SEQ ID NO: 14598
  misc_feature 1..36: note = Synthetic oligonucleotide
  source 1..36: mol_type = other DNA

SEQ ID NO: 30267 - DNA, 36 bp, synthetic construct; identical to SEQ ID NO: 14598
  misc_feature 1..36: note = Synthetic oligonucleotide
  source 1..36: mol_type = other DNA

SEQ ID NO: 30268 - DNA, 36 bp, synthetic construct; identical to SEQ ID NO: 14598
  misc_feature 1..36: note = Synthetic oligonucleotide
  source 1..36: mol_type = other DNA

SEQ ID NO: 30269 - DNA, 36 bp, synthetic construct; identical to SEQ ID NO: 14598
  misc_feature 1..36: note = Synthetic oligonucleotide
  source 1..36: mol_type = other DNA

SEQ ID NO: 30270 - DNA, 36 bp, synthetic construct; identical to SEQ ID NO: 14598
  misc_feature 1..36: note = Synthetic oligonucleotide
  source 1..36: mol_type = other DNA

SEQ ID NO: 30271 - DNA, 36 bp, synthetic construct; identical to SEQ ID NO: 14598
  misc_feature 1..36: note = Synthetic oligonucleotide
  source 1..36: mol_type = other DNA

SEQ ID NO: 30272 - DNA, 36 bp, synthetic construct; identical to SEQ ID NO: 14598
  misc_feature 1..36: note = Synthetic oligonucleotide
  source 1..36: mol_type = other DNA

SEQ ID NO: 30273 - DNA, 36 bp, synthetic construct; identical to SEQ ID NO: 14598
  misc_feature 1..36: note = Synthetic oligonucleotide
  source 1..36: mol_type = other DNA

SEQ ID NO: 30274 - DNA, 36 bp, synthetic construct; identical to SEQ ID NO: 14598
  misc_feature 1..36: note = Synthetic oligonucleotide
  source 1..36: mol_type = other DNA

SEQ ID NO: 30275 - DNA, 36 bp, synthetic construct; identical to SEQ ID NO: 14598
  misc_feature 1..36: note = Synthetic oligonucleotide
  source 1..36: mol_type = other DNA

SEQ ID NO: 30276 - DNA, 36 bp, synthetic construct; identical to SEQ ID NO: 14598
  misc_feature 1..36: note = Synthetic oligonucleotide
  source 1..36: mol_type = other DNA

SEQ ID NO: 30277 - DNA, 36 bp, synthetic construct; identical to SEQ ID NO: 14598
  misc_feature 1..36: note = Synthetic oligonucleotide
  source 1..36: mol_type = other DNA

SEQ ID NO: 30278 - DNA, 36 bp, synthetic construct; identical to SEQ ID NO: 14598
  misc_feature 1..36: note = Synthetic oligonucleotide
  source 1..36: mol_type = other DNA

SEQ ID NO: 30279 - DNA, 36 bp, synthetic construct; identical to SEQ ID NO: 14598
  misc_feature 1..36: note = Synthetic oligonucleotide
  source 1..36: mol_type = other DNA

SEQ ID NO: 30280 - DNA, 36 bp, synthetic construct; identical to SEQ ID NO: 14598
  misc_feature 1..36: note = Synthetic oligonucleotide
  source 1..36: mol_type = other DNA

SEQ ID NO: 30281 - DNA, 36 bp, synthetic construct; identical to SEQ ID NO: 14598
  misc_feature 1..36: note = Synthetic oligonucleotide
  source 1..36: mol_type = other DNA

SEQ ID NO: 30282 - DNA, 36 bp, synthetic construct; identical to SEQ ID NO: 14598
  misc_feature 1..36: note = Synthetic oligonucleotide
  source 1..36: mol_type = other DNA

SEQ ID NO: 30283 - DNA, 36 bp, synthetic construct; identical to SEQ ID NO: 14598
  misc_feature 1..36: note = Synthetic oligonucleotide
  source 1..36: mol_type = other DNA

SEQ ID NO: 30284 - DNA, 36 bp, synthetic construct; identical to SEQ ID NO: 14598
  misc_feature 1..36: note = Synthetic oligonucleotide
  source 1..36: mol_type = other DNA

SEQ ID NO: 30285 - DNA, 36 bp, synthetic construct; identical to SEQ ID NO: 14598
  misc_feature 1..36: note = Synthetic oligonucleotide
  source 1..36: mol_type = other DNA

SEQ ID NO: 30286 - DNA, 36 bp, synthetic construct; identical to SEQ ID NO: 14598
  misc_feature 1..36: note = Synthetic oligonucleotide
  source 1..36: mol_type = other DNA

SEQ ID NO: 30287 - DNA, 36 bp, synthetic construct; identical to SEQ ID NO: 14598
  misc_feature 1..36: note = Synthetic oligonucleotide
  source 1..36: mol_type = other DNA

SEQ ID NO: 30288 - DNA, 36 bp, synthetic construct; identical to SEQ ID NO: 14598
  misc_feature 1..36: note = Synthetic oligonucleotide
  source 1..36: mol_type = other DNA

SEQ ID NO: 30289 - DNA, 36 bp, synthetic construct; identical to SEQ ID NO: 14598
  misc_feature 1..36: note = Synthetic oligonucleotide
  source 1..36: mol_type = other DNA

SEQ ID NO: 30290 - DNA, 36 bp, synthetic construct; identical to SEQ ID NO: 14598
  misc_feature 1..36: note = Synthetic oligonucleotide
  source 1..36: mol_type = other DNA

SEQ ID NO: 30291 - DNA, 36 bp, synthetic construct; identical to SEQ ID NO: 14598
  misc_feature 1..36: note = Synthetic oligonucleotide
  source 1..36: mol_type = other DNA

SEQ ID NO: 30292 - DNA, 36 bp, synthetic construct; identical to SEQ ID NO: 14598
  misc_feature 1..36: note = Synthetic oligonucleotide
  source 1..36: mol_type = other DNA

SEQ ID NO: 30293 - DNA, 36 bp, synthetic construct; identical to SEQ ID NO: 14598
  misc_feature 1..36: note = Synthetic oligonucleotide
  source 1..36: mol_type = other DNA

SEQ ID NO: 30294 - DNA, 36 bp, synthetic construct; identical to SEQ ID NO: 14598
  misc_feature 1..36: note = Synthetic oligonucleotide
  source 1..36: mol_type = other DNA

SEQ ID NO: 30295 - DNA, 36 bp, synthetic construct; identical to SEQ ID NO: 14598
  misc_feature 1..36: note = Synthetic oligonucleotide
  source 1..36: mol_type = other DNA

SEQ ID NO: 30296 - DNA, 36 bp, synthetic construct; identical to SEQ ID NO: 14598
  misc_feature 1..36: note = Synthetic oligonucleotide
  source 1..36: mol_type = other DNA

SEQ ID NO: 30297 - DNA, 36 bp, synthetic construct; identical to SEQ ID NO: 14598
  misc_feature 1..36: note = Synthetic oligonucleotide
  source 1..36: mol_type = other DNA

SEQ ID NO: 30298 - DNA, 36 bp, synthetic construct; identical to SEQ ID NO: 14598
  misc_feature 1..36: note = Synthetic oligonucleotide
  source 1..36: mol_type = other DNA

SEQ ID NO: 30299 - DNA, 36 bp, synthetic construct; identical to SEQ ID NO: 14598
  misc_feature 1..36: note = Synthetic oligonucleotide
  source 1..36: mol_type = other DNA

SEQ ID NO: 30300 - DNA, 36 bp, synthetic construct; identical to SEQ ID NO: 14598
  misc_feature 1..36: note = Synthetic oligonucleotide
  source 1..36: mol_type = other DNA

SEQ ID NO: 30301 - DNA, 36 bp, synthetic construct; identical to SEQ ID NO: 14598
  misc_feature 1..36: note = Synthetic oligonucleotide
  source 1..36: mol_type = other DNA

SEQ ID NO: 30302 - DNA, 36 bp, synthetic construct; identical to SEQ ID NO: 14598
  misc_feature 1..36: note = Synthetic oligonucleotide
  source 1..36: mol_type = other DNA

SEQ ID NO: 30303 - DNA, 36 bp, synthetic construct; identical to SEQ ID NO: 14598
  misc_feature 1..36: note = Synthetic oligonucleotide
  source 1..36: mol_type = other DNA

SEQ ID NO: 30304 - DNA, 36 bp, synthetic construct; identical to SEQ ID NO: 14598
  misc_feature 1..36: note = Synthetic oligonucleotide
  source 1..36: mol_type = other DNA

SEQ ID NO: 30305 - DNA, 36 bp, synthetic construct; identical to SEQ ID NO: 14598
  misc_feature 1..36: note = Synthetic oligonucleotide
  source 1..36: mol_type = other DNA

SEQ ID NO: 30306 - DNA, 36 bp, synthetic construct; identical to SEQ ID NO: 14598
  misc_feature 1..36: note = Synthetic oligonucleotide
  source 1..36: mol_type = other DNA

SEQ ID NO: 30307 - DNA, 36 bp, synthetic construct; identical to SEQ ID NO: 14598
  misc_feature 1..36: note = Synthetic oligonucleotide
  source 1..36: mol_type = other DNA

SEQ ID NO: 30308 - DNA, 36 bp, synthetic construct; identical to SEQ ID NO: 14598
  misc_feature 1..36: note = Synthetic oligonucleotide
  source 1..36: mol_type = other DNA

SEQ ID NO: 30309 - DNA, 36 bp, synthetic construct; identical to SEQ ID NO: 14598
  misc_feature 1..36: note = Synthetic oligonucleotide
  source 1..36: mol_type = other DNA

SEQ ID NO: 30310 - DNA, 36 bp, synthetic construct; identical to SEQ ID NO: 14598
  misc_feature 1..36: note = Synthetic oligonucleotide
  source 1..36: mol_type = other DNA

SEQ ID NO: 30311 - DNA, 36 bp, synthetic construct; identical to SEQ ID NO: 14598
  misc_feature 1..36: note = Synthetic oligonucleotide
  source 1..36: mol_type = other DNA

SEQ ID NO: 30312 - DNA, 36 bp, synthetic construct; identical to SEQ ID NO: 14598
  misc_feature 1..36: note = Synthetic oligonucleotide
  source 1..36: mol_type = other DNA

SEQ ID NO: 30313 - DNA, 36 bp, synthetic construct; identical to SEQ ID NO: 14598
  misc_feature 1..36: note = Synthetic oligonucleotide
  source 1..36: mol_type = other DNA

SEQ ID NO: 30314 - DNA, 36 bp, synthetic construct; identical to SEQ ID NO: 14598
  misc_feature 1..36: note = Synthetic oligonucleotide
  source 1..36: mol_type = other DNA

SEQ ID NO: 30315 - DNA, 36 bp, synthetic construct; identical to SEQ ID NO: 14598
  misc_feature 1..36: note = Synthetic oligonucleotide
  source 1..36: mol_type = other DNA

SEQ ID NO: 30316 - DNA, 37 bp, synthetic construct
  misc_feature 1..37: note = Synthetic oligonucleotide
  source 1..37: mol_type = other DNA
gttttactaccttatagatttacactattctcaaacc

SEQ ID NO: 30317 - DNA, 36 bp, synthetic construct
  misc_feature 1..36: note = Synthetic oligonucleotide
  source 1..36: mol_type = other DNA
gttttactaccttatgaaattacactactctcaaac

SEQ ID NO: 30318 - DNA, 36 bp, synthetic construct; identical to SEQ ID NO: 30317
  misc_feature 1..36: note = Synthetic oligonucleotide
  source 1..36: mol_type = other DNA

SEQ ID NO: 30319 - DNA, 36 bp, synthetic construct; identical to SEQ ID NO: 30317
  misc_feature 1..36: note = Synthetic oligonucleotide
  source 1..36: mol_type = other DNA

SEQ ID NO: 30320 - DNA, 36 bp, synthetic construct; identical to SEQ ID NO: 30317
  misc_feature 1..36: note = Synthetic oligonucleotide
  source 1..36: mol_type = other DNA

SEQ ID NO: 30321 - DNA, 36 bp, synthetic construct; identical to SEQ ID NO: 30317
  misc_feature 1..36: note = Synthetic oligonucleotide
  source 1..36: mol_type = other DNA

SEQ ID NO: 30322 - DNA, 36 bp, synthetic construct; identical to SEQ ID NO: 14599
  misc_feature 1..36: note = Synthetic oligonucleotide
  source 1..36: mol_type = other DNA

SEQ ID NO: 30323 - DNA, 36 bp, synthetic construct; identical to SEQ ID NO: 14599
  misc_feature 1..36: note = Synthetic oligonucleotide
  source 1..36: mol_type = other DNA

SEQ ID NO: 30324 - DNA, 36 bp, synthetic construct; identical to SEQ ID NO: 14599
  misc_feature 1..36: note = Synthetic oligonucleotide
  source 1..36: mol_type = other DNA

SEQ ID NO: 30325 - DNA, 36 bp, synthetic construct; identical to SEQ ID NO: 14599
  misc_feature 1..36: note = Synthetic oligonucleotide
  source 1..36: mol_type = other DNA

SEQ ID NO: 30326 - DNA, 36 bp, synthetic construct; identical to SEQ ID NO: 14599
  misc_feature 1..36: note = Synthetic oligonucleotide
  source 1..36: mol_type = other DNA

SEQ ID NO: 30327 - DNA, 36 bp, synthetic construct; identical to SEQ ID NO: 14599
  misc_feature 1..36: note = Synthetic oligonucleotide
  source 1..36: mol_type = other DNA

SEQ ID NO: 30328 - DNA, 36 bp, synthetic construct; identical to SEQ ID NO: 14599
  misc_feature 1..36: note = Synthetic oligonucleotide
  source 1..36: mol_type = other DNA

SEQ ID NO: 30329 - DNA, 36 bp, synthetic construct
  misc_feature 1..36: note = Synthetic oligonucleotide
  source 1..36: mol_type = other DNA
gttttactaccttatgaatttacactattctcaaac

SEQ ID NO: 30330 - DNA, 36 bp, synthetic construct
  misc_feature 1..36: note = Synthetic oligonucleotide
  source 1..36: mol_type = other DNA
gttttactactatctaaaataacatacttctaaaac

SEQ ID NO: 30331 - DNA, 36 bp, synthetic construct
  misc_feature 1..36: note = Synthetic oligonucleotide
  source 1..36: mol_type = other DNA
gttttactactatctaagataacactactctcaaac

SEQ ID NO: 30332 - DNA, 36 bp, synthetic construct; identical to SEQ ID NO: 14603
  misc_feature 1..36: note = Synthetic oligonucleotide
  source 1..36: mol_type = other DNA

SEQ ID NO: 30333 - DNA, 36 bp, synthetic construct; identical to SEQ ID NO: 14603
  misc_feature 1..36: note = Synthetic oligonucleotide
  source 1..36: mol_type = other DNA

SEQ ID NO: 30334 - DNA, 36 bp, synthetic construct; identical to SEQ ID NO: 14604
  misc_feature 1..36: note = Synthetic oligonucleotide
  source 1..36: mol_type = other DNA

SEQ ID NO: 30335 - DNA, 36 bp, synthetic construct; identical to SEQ ID NO: 14605
  misc_feature 1..36: note = Synthetic oligonucleotide
  source 1..36: mol_type = other DNA

SEQ ID NO: 30336 - DNA, 36 bp, synthetic construct; identical to SEQ ID NO: 14607
  misc_feature 1..36: note = Synthetic oligonucleotide
  source 1..36: mol_type = other DNA

SEQ ID NO: 30337 - DNA, 36 bp, synthetic construct
  misc_feature 1..36: note = Synthetic oligonucleotide
  source 1..36: mol_type = other DNA
gttttactcttttcataaattacaaggttctcaaac

SEQ ID NO: 30338 - DNA, 36 bp, synthetic construct; identical to SEQ ID NO: 14610
  misc_feature 1..36: note = Synthetic oligonucleotide
  source 1..36: mol_type = other DNA

SEQ ID NO: 30339 - DNA, 36 bp, synthetic construct
  misc_feature 1..36: note = Synthetic oligonucleotide
  source 1..36: mol_type = other DNA
gttttactgataggaaattattgagagtacaaaaac

SEQ ID NO: 30340 - DNA, 36 bp, synthetic construct
  misc_feature 1..36: note = Synthetic oligonucleotide
  source 1..36: mol_type = other DNA
gttttactgccttatgaaatcacactattctcaaac

SEQ ID NO: 30341 - DNA, 36 bp, synthetic construct
  misc_feature 1..36: note = Synthetic oligonucleotide
  source 1..36: mol_type = other DNA
gttttactgtttctaaatctttgaaggtacaaaaac

SEQ ID NO: 30342 - DNA, 36 bp, synthetic construct
  misc_feature 1..36: note = Synthetic oligonucleotide
  source 1..36: mol_type = other DNA
gttttacttatacttaaaaaaccctaatgagaaaac

SEQ ID NO: 30343 - DNA, 36 bp, synthetic construct
  misc_feature 1..36: note = Synthetic oligonucleotide
  source 1..36: mol_type = other DNA
gttttacttatattgagaataacataactctcaaac

SEQ ID NO: 30344 - DNA, 36 bp, synthetic construct; identical to SEQ ID NO: 30343
  misc_feature 1..36: note = Synthetic oligonucleotide
  source 1..36: mol_type = other DNA

SEQ ID NO: 30345 - DNA, 36 bp, synthetic construct
  misc_feature 1..36: note = Synthetic oligonucleotide
  source 1..36: mol_type = other DNA
gttttacttctatgtcatcttaaatggtattaaaac

SEQ ID NO: 30346 - DNA, 36 bp, synthetic construct
  misc_feature 1..36: note = Synthetic oligonucleotide
  source 1..36: mol_type = other DNA
gttttacttgcctgtctgatttaatcctgctaaaat

SEQ ID NO: 30347 - DNA, 30 bp, synthetic construct
  misc_feature 1..30: note = Synthetic oligonucleotide
  source 1..30: mol_type = other DNA
gttttagaacaatgttattttgaatggtaa

SEQ ID NO: 30348 - DNA, 36 bp, synthetic construct; identical to SEQ ID NO: 14613
  misc_feature 1..36: note = Synthetic oligonucleotide
  source 1..36: mol_type = other DNA

SEQ ID NO: 30349 - DNA, 36 bp, synthetic construct; identical to SEQ ID NO: 14613
  misc_feature 1..36: note = Synthetic oligonucleotide
  source 1..36: mol_type = other DNA

SEQ ID NO: 30350 - DNA, 36 bp, synthetic construct; identical to SEQ ID NO: 14613
  misc_feature 1..36: note = Synthetic oligonucleotide
  source 1..36: mol_type = other DNA

SEQ ID NO: 30351 - DNA, 36 bp, synthetic construct; identical to SEQ ID NO: 14613
  misc_feature 1..36: note = Synthetic oligonucleotide
  source 1..36: mol_type = other DNA

SEQ ID NO: 30352 - DNA, 36 bp, synthetic construct; identical to SEQ ID NO: 14613
  misc_feature 1..36: note = Synthetic oligonucleotide
  source 1..36: mol_type = other DNA

SEQ ID NO: 30353 - DNA, 36 bp, synthetic construct; identical to SEQ ID NO: 14613
  misc_feature 1..36: note = Synthetic oligonucleotide
  source 1..36: mol_type = other DNA

SEQ ID NO: 30354 - DNA, 36 bp, synthetic construct; identical to SEQ ID NO: 14613
  misc_feature 1..36: note = Synthetic oligonucleotide
  source 1..36: mol_type = other DNA

SEQ ID NO: 30355 - DNA, 36 bp, synthetic construct
  misc_feature 1..36: note = Synthetic oligonucleotide
  source 1..36: mol_type = other DNA
gttttagaactgtgttgtttcgaatggttccaaaac

SEQ ID NO: 30356 - DNA, 36 bp, synthetic construct
  misc_feature 1..36: note = Synthetic oligonucleotide
  source 1..36: mol_type = other DNA
gttttagaagagtgtcagatcaataaggttaagagc

SEQ ID NO: 30357 - DNA, 36 bp, synthetic construct
  misc_feature 1..36: note = Synthetic oligonucleotide
  source 1..36: mol_type = other DNA
gttttagaagagtgtcgaatcaatatagttaagatc

SEQ ID NO: 30358 - DNA, 36 bp, synthetic construct
  misc_feature 1..36: note = Synthetic oligonucleotide
  source 1..36: mol_type = other DNA
gttttagaaggttgttaaatcagtaagttgaaaaac

SEQ ID NO: 30359 - DNA, 36 bp, synthetic construct; identical to SEQ ID NO: 30358
  misc_feature 1..36: note = Synthetic oligonucleotide
  source 1..36: mol_type = other DNA

SEQ ID NO: 30360 - DNA, 36 bp, synthetic construct; identical to SEQ ID NO: 30358
  misc_feature 1..36: note = Synthetic oligonucleotide
  source 1..36: mol_type = other DNA

SEQ ID NO: 30361 - DNA, 36 bp, synthetic construct
  misc_feature 1..36: note = Synthetic oligonucleotide
  source 1..36: mol_type = other DNA
gttttagaaggttgttagatcaataaggtttagaac

SEQ ID NO: 30362 - DNA, 36 bp, synthetic construct
  misc_feature 1..36: note = Synthetic oligonucleotide
  source 1..36: mol_type = other DNA
gttttagaagtaagtcatctcaattacttatgaacc

SEQ ID NO: 30363 - DNA, 36 bp, synthetic construct
  misc_feature 1..36: note = Synthetic oligonucleotide
  source 1..36: mol_type = other DNA
gttttagaagtactaaaaatgtcatgatactaaaac

SEQ ID NO: 30364 - DNA, 36 bp, synthetic construct
  misc_feature 1..36: note = Synthetic oligonucleotide
  source 1..36: mol_type = other DNA
gttttagaagtatgttattttgaatggtaacaaaac

SEQ ID NO: 30365 - DNA, 36 bp, synthetic construct; identical to SEQ ID NO: 30364
  misc_feature 1..36: note = Synthetic oligonucleotide
  source 1..36: mol_type = other DNA

SEQ ID NO: 30366 - DNA, 36 bp, synthetic construct; identical to SEQ ID NO: 30364
  misc_feature 1..36: note = Synthetic oligonucleotide
  source 1..36: mol_type = other DNA

SEQ ID NO: 30367 - DNA, 28 bp, synthetic construct
  misc_feature 1..28: note = Synthetic oligonucleotide
  source 1..28: mol_type = other DNA
gttttagaagtgtgttattttgaatgat

SEQ ID NO: 30368 - DNA, 36 bp, synthetic construct; identical to SEQ ID NO: 14618
  misc_feature 1..36: note = Synthetic oligonucleotide
  source 1..36: mol_type = other DNA

SEQ ID NO: 30369 - DNA, 21 bp, synthetic construct
  misc_feature 1..21: note = Synthetic oligonucleotide
  source 1..21: mol_type = other DNA
gttttagaatagtgtaaaatt

SEQ ID NO: 30370 - DNA, 36 bp, synthetic construct
  misc_feature 1..36: note = Synthetic oligonucleotide
  source 1..36: mol_type = other DNA
gttttagaatcttacgtattaacaagtctctcaaac

SEQ ID NO: 30371 - DNA, 36 bp, synthetic construct
  misc_feature 1..36: note = Synthetic oligonucleotide
  source 1..36: mol_type = other DNA
gttttagaccaatgtaatcttagatagtagtaaaac

SEQ ID NO: 30372 - DNA, 36 bp, synthetic construct; identical to SEQ ID NO: 30371
  misc_feature 1..36: note = Synthetic oligonucleotide
  source 1..36: mol_type = other DNA

SEQ ID NO: 30373 - DNA, 22 bp, synthetic construct
  misc_feature 1..22: note = Synthetic oligonucleotide
  source 1..22: mol_type = other DNA
gttttagacctatgtaaaatca

SEQ ID NO: 30374 - DNA, 22 bp, synthetic construct
  misc_feature 1..22: note = Synthetic oligonucleotide
  source 1..22: mol_type = other DNA
gttttagacctatgtaaaatca

SEQ ID NO: 30375 - DNA, 36 bp, synthetic construct
  misc_feature 1..36: note = Synthetic oligonucleotide
  source 1..36: mol_type = other DNA
gttttagacctattcaaacttacaaggttctcaaac

SEQ ID NO: 30376 - DNA, 36 bp, synthetic construct
  misc_feature 1..36: note = Synthetic oligonucleotide
  source 1..36: mol_type = other DNA
gttttagacctatttgaattaacaaggctctcaaac

SEQ ID NO: 30377 - DNA, 36 bp, synthetic construct; identical to SEQ ID NO: 14623
  misc_feature 1..36: note = Synthetic oligonucleotide
  source 1..36: mol_type = other DNA

SEQ ID NO: 30378 - DNA, 36 bp, synthetic construct; identical to SEQ ID NO: 14623
  misc_feature 1..36: note = Synthetic oligonucleotide
  source 1..36: mol_type = other DNA

SEQ ID NO: 30379 - DNA, 36 bp, synthetic construct
  misc_feature 1..36: note = Synthetic oligonucleotide
  source 1..36: mol_type = other DNA
gttttagagaattacagaattacactactctcaaac

SEQ ID NO: 30380 - DNA, 36 bp, synthetic construct
  misc_feature 1..36: note = Synthetic oligonucleotide
  source 1..36: mol_type = other DNA
gttttagagacttacaaacttacatggttctcaaac

SEQ ID NO: 30381 - DNA, 36 bp, synthetic construct; identical to SEQ ID NO: 30380
  misc_feature 1..36: note = Synthetic oligonucleotide
  source 1..36: mol_type = other DNA

SEQ ID NO: 30382 - DNA, 36 bp, synthetic construct
  misc_feature 1..36: note = Synthetic oligonucleotide
  source 1..36: mol_type = other DNA
gttttagagatttacagaatcacactactctcaaac

SEQ ID NO: 30383 - DNA, 36 bp, synthetic construct; identical to SEQ ID NO: 14626
  misc_feature 1..36: note = Synthetic oligonucleotide
  source 1..36: mol_type = other DNA

SEQ ID NO: 30384 - DNA, 36 bp, synthetic construct; identical to SEQ ID NO: 14626
  misc_feature 1..36: note = Synthetic oligonucleotide
  source 1..36: mol_type = other DNA

SEQ ID NO: 30385 - DNA, 36 bp, synthetic construct; identical to SEQ ID NO: 14626
  misc_feature 1..36: note = Synthetic oligonucleotide
  source 1..36: mol_type = other DNA

SEQ ID NO: 30386 - DNA, 36 bp, synthetic construct; identical to SEQ ID NO: 14626
  misc_feature 1..36: note = Synthetic oligonucleotide
  source 1..36: mol_type = other DNA

SEQ ID NO: 30387 - DNA, 36 bp, synthetic construct; identical to SEQ ID NO: 14626
  misc_feature 1..36: note = Synthetic oligonucleotide
  source 1..36: mol_type = other DNA

SEQ ID NO: 30388 - DNA, 36 bp, synthetic construct; identical to SEQ ID NO: 14626
  misc_feature 1..36: note = Synthetic oligonucleotide
  source 1..36: mol_type = other DNA

SEQ ID NO: 30389 - DNA, 36 bp, synthetic construct; identical to SEQ ID NO: 14626
  misc_feature 1..36: note = Synthetic oligonucleotide
  source 1..36: mol_type = other DNA

SEQ ID NO: 30390 - DNA, 36 bp, synthetic construct
  misc_feature 1..36: note = Synthetic oligonucleotide
  source 1..36: mol_type = other DNA
gttttagagatttgcagaattacactactctcaaac

SEQ ID NO: 30391 - DNA, 36 bp, synthetic construct
  misc_feature 1..36: note = Synthetic oligonucleotide
  source 1..36: mol_type = other DNA
gttttagagccgtgttgttttgaatgactccaaaac

SEQ ID NO: 30392 - DNA, 36 bp, synthetic construct; identical to SEQ ID NO: 14632
  misc_feature 1..36: note = Synthetic oligonucleotide
  source 1..36: mol_type = other DNA

SEQ ID NO: 30393 - DNA, 36 bp, synthetic construct; identical to SEQ ID NO: 14632
  misc_feature 1..36: note = Synthetic oligonucleotide
  source 1..36: mol_type = other DNA

SEQ ID NO: 30394 - DNA, 36 bp, synthetic construct; identical to SEQ ID NO: 14634
  misc_feature 1..36: note = Synthetic oligonucleotide
  source 1..36: mol_type = other DNA

SEQ ID NO: 30395 - DNA, 26 bp, synthetic construct
  misc_feature 1..26: note = Synthetic oligonucleotide
  source 1..26: mol_type = other DNA
gttttagagctatgttgttttgaatg

SEQ ID NO: 30396 - DNA, 33 bp, synthetic construct
  misc_feature 1..33: note = Synthetic oligonucleotide
  source 1..33: mol_type = other DNA
gttttagagctgtgctgtttcgaatggttccaa

SEQ ID NO: 30397 - DNA, 36 bp, synthetic construct
  misc_feature 1..36: note = Synthetic oligonucleotide
  source 1..36: mol_type = other DNA
gttttagagctgtgctgtttcgaatggttccaaaac

SEQ ID NO: 30398 - DNA, 36 bp, synthetic construct; identical to SEQ ID NO: 14636
  misc_feature 1..36: note = Synthetic oligonucleotide
  source 1..36: mol_type = other DNA

SEQ ID NO: 30399 - DNA, 36 bp, synthetic construct; identical to SEQ ID NO: 14638
  misc_feature 1..36: note = Synthetic oligonucleotide
  source 1..36: mol_type = other DNA

SEQ ID NO: 30400 - DNA, 36 bp, synthetic construct
  misc_feature 1..36: note = Synthetic oligonucleotide
  source 1..36: mol_type = other DNA
gttttagagctgtgttgaattgaatgattccgaaac

SEQ ID NO: 30401 - DNA, 36 bp, synthetic construct; identical to SEQ ID NO: 14640
  misc_feature 1..36: note = Synthetic oligonucleotide
  source 1..36: mol_type = other DNA

SEQ ID NO: 30402 - DNA, 36 bp, synthetic construct; identical to SEQ ID NO: 14641
  misc_feature 1..36: note = Synthetic oligonucleotide
  source 1..36: mol_type = other DNA

SEQ ID NO: 30403 - DNA, 36 bp, synthetic construct; identical to SEQ ID NO: 14641
  misc_feature 1..36: note = Synthetic oligonucleotide
  source 1..36: mol_type = other DNA

SEQ ID NO: 30404 - DNA, 36 bp, synthetic construct; identical to SEQ ID NO: 14641
  misc_feature 1..36: note = Synthetic oligonucleotide
  source 1..36: mol_type = other DNA

SEQ ID NO: 30405 - DNA, 36 bp, synthetic construct; identical to SEQ ID NO: 14641
  misc_feature 1..36: note = Synthetic oligonucleotide
  source 1..36: mol_type = other DNA

SEQ ID NO: 30406 - DNA, 36 bp, synthetic construct; identical to SEQ ID NO: 14641
  misc_feature 1..36: note = Synthetic oligonucleotide
  source 1..36: mol_type = other DNA

SEQ ID NO: 30407 - DNA, 36 bp, synthetic construct; identical to SEQ ID NO: 14641
  misc_feature 1..36: note = Synthetic oligonucleotide
  source 1..36: mol_type = other DNA

SEQ ID NO: 30408 - DNA, 36 bp, synthetic construct; identical to SEQ ID NO: 14641
  misc_feature 1..36: note = Synthetic oligonucleotide
  source 1..36: mol_type = other DNA

SEQ ID NO: 30409 - DNA, 36 bp, synthetic construct; identical to SEQ ID NO: 14641
  misc_feature 1..36: note = Synthetic oligonucleotide
  source 1..36: mol_type = other DNA

SEQ ID NO: 30410 - DNA, 36 bp, synthetic construct
  misc_feature 1..36: note = Synthetic oligonucleotide
  source 1..36: mol_type = other DNA
gttttagagctgtgttggattgaatgcctacaaaac

SEQ ID NO: 30411 - DNA, 36 bp, synthetic construct
  misc_feature 1..36: note = Synthetic oligonucleotide
  source 1..36: mol_type = other DNA
gttttagagctgtgttgttctgaatggttccaaaat

SEQ ID NO: 30412 - DNA, 36 bp, synthetic construct; identical to SEQ ID NO: 30411
  misc_feature 1..36: note = Synthetic oligonucleotide
  source 1..36: mol_type = other DNA

SEQ ID NO: 30413 - DNA, 36 bp, synthetic construct; identical to SEQ ID NO: 30411
  misc_feature 1..36: note = Synthetic oligonucleotide
  source 1..36: mol_type = other DNA

SEQ ID NO: 30414 - DNA, 36 bp, synthetic construct; identical to SEQ ID NO: 30411
  misc_feature 1..36: note = Synthetic oligonucleotide
  source 1..36: mol_type = other DNA

SEQ ID NO: 30415 - DNA, 36 bp, synthetic construct; identical to SEQ ID NO: 14644
  misc_feature 1..36: note = Synthetic oligonucleotide
  source 1..36: mol_type = other DNA

SEQ ID NO: 30416 - DNA, 36 bp, synthetic construct; identical to SEQ ID NO: 14644
  misc_feature 1..36: note = Synthetic oligonucleotide
  source 1..36: mol_type = other DNA

SEQ ID NO: 30417 - DNA, 36 bp, synthetic construct; identical to SEQ ID NO: 14644
  misc_feature 1..36: note = Synthetic oligonucleotide
  source 1..36: mol_type = other DNA

SEQ ID NO: 30418 - DNA, 36 bp, synthetic construct; identical to SEQ ID NO: 14644
  misc_feature 1..36: note = Synthetic oligonucleotide
  source 1..36: mol_type = other DNA

SEQ ID NO: 30419 - DNA, 36 bp, synthetic construct; identical to SEQ ID NO: 14644
  misc_feature 1..36: note = Synthetic oligonucleotide
  source 1..36: mol_type = other DNA

SEQ ID NO: 30420 - DNA, 36 bp, synthetic construct; identical to SEQ ID NO: 14644
  misc_feature 1..36: note = Synthetic oligonucleotide
  source 1..36: mol_type = other DNA

SEQ ID NO: 30421 - DNA, 36 bp, synthetic construct; identical to SEQ ID NO: 14644
  misc_feature 1..36: note = Synthetic oligonucleotide
  source 1..36: mol_type = other DNA

SEQ ID NO: 30422 - DNA, 36 bp, synthetic construct; identical to SEQ ID NO: 14644
  misc_feature 1..36: note = Synthetic oligonucleotide
  source 1..36: mol_type = other DNA

SEQ ID NO: 30423 - DNA, 36 bp, synthetic construct; identical to SEQ ID NO: 14644
  misc_feature 1..36: note = Synthetic oligonucleotide
  source 1..36: mol_type = other DNA

SEQ ID NO: 30424 - DNA, 36 bp, synthetic construct; identical to SEQ ID NO: 14644
  misc_feature 1..36: note = Synthetic oligonucleotide
  source 1..36: mol_type = other DNA

SEQ ID NO: 30425 - DNA, 36 bp, synthetic construct; identical to SEQ ID NO: 14644
  misc_feature 1..36: note = Synthetic oligonucleotide
  source 1..36: mol_type = other DNA

SEQ ID NO: 30426 - DNA, 36 bp, synthetic construct; identical to SEQ ID NO: 14644
  misc_feature 1..36: note = Synthetic oligonucleotide
  source 1..36: mol_type = other DNA

SEQ ID NO: 30427 - DNA, 36 bp, synthetic construct; identical to SEQ ID NO: 14644
  misc_feature 1..36: note = Synthetic oligonucleotide
  source 1..36: mol_type = other DNA

SEQ ID NO: 30428 - DNA, 36 bp, synthetic construct; identical to SEQ ID NO: 14644
  misc_feature 1..36: note = Synthetic oligonucleotide
  source 1..36: mol_type = other DNA

SEQ ID NO: 30429 - DNA, 36 bp, synthetic construct; identical to SEQ ID NO: 14644
  misc_feature 1..36: note = Synthetic oligonucleotide
  source 1..36: mol_type = other DNA

SEQ ID NO: 30430 - DNA, 36 bp, synthetic construct; identical to SEQ ID NO: 14644
  misc_feature 1..36: note = Synthetic oligonucleotide
  source 1..36: mol_type = other DNA

SEQ ID NO: 30431 - DNA, 36 bp, synthetic construct; identical to SEQ ID NO: 14644
  misc_feature 1..36: note = Synthetic oligonucleotide
  source 1..36: mol_type = other DNA

SEQ ID NO: 30432 - DNA, 36 bp, synthetic construct; identical to SEQ ID NO: 14644
  misc_feature 1..36: note = Synthetic oligonucleotide
  source 1..36: mol_type = other DNA

SEQ ID NO: 30433 - DNA, 36 bp, synthetic construct; identical to SEQ ID NO: 14644
  misc_feature 1..36: note = Synthetic oligonucleotide
  source 1..36: mol_type = other DNA

SEQ ID NO: 30434 - DNA, 36 bp, synthetic construct; identical to SEQ ID NO: 14644
  misc_feature 1..36: note = Synthetic oligonucleotide
  source 1..36: mol_type = other DNA

SEQ ID NO: 30435 - DNA, 36 bp, synthetic construct; identical to SEQ ID NO: 14644
  misc_feature 1..36: note = Synthetic oligonucleotide
  source 1..36: mol_type = other DNA

SEQ ID NO: 30436 - DNA, 36 bp, synthetic construct; identical to SEQ ID NO: 14644
  misc_feature 1..36: note = Synthetic oligonucleotide
  source 1..36: mol_type = other DNA

SEQ ID NO: 30437 - DNA, 36 bp, synthetic construct; identical to SEQ ID NO: 14644
  misc_feature 1..36: note = Synthetic oligonucleotide
  source 1..36: mol_type = other DNA

SEQ ID NO: 30438 - DNA, 36 bp, synthetic construct; identical to SEQ ID NO: 14644
  misc_feature 1..36: note = Synthetic oligonucleotide
  source 1..36: mol_type = other DNA

SEQ ID NO: 30439 - DNA, 36 bp, synthetic construct; identical to SEQ ID NO: 14644
  misc_feature 1..36: note = Synthetic oligonucleotide
  source 1..36: mol_type = other DNA

SEQ ID NO: 30440 - DNA, 36 bp, synthetic construct; identical to SEQ ID NO: 14644
  misc_feature 1..36: note = Synthetic oligonucleotide
  source 1..36: mol_type = other DNA

SEQ ID NO: 30441 - DNA, 36 bp, synthetic construct; identical to SEQ ID NO: 14644
  misc_feature 1..36: note = Synthetic oligonucleotide
  source 1..36: mol_type = other DNA

SEQ ID NO: 30442 - DNA, 36 bp, synthetic construct; identical to SEQ ID NO: 14644
  misc_feature 1..36: note = Synthetic oligonucleotide
  source 1..36: mol_type = other DNA

SEQ ID NO: 30443 - DNA, 36 bp, synthetic construct; identical to SEQ ID NO: 14644
  misc_feature 1..36: note = Synthetic oligonucleotide
  source 1..36: mol_type = other DNA

SEQ ID NO: 30444 - DNA, 36 bp, synthetic construct; identical to SEQ ID NO: 14644
  misc_feature 1..36: note = Synthetic oligonucleotide
  source 1..36: mol_type = other DNA

SEQ ID NO: 30445 - DNA, 36 bp, synthetic construct; identical to SEQ ID NO: 14644
  misc_feature 1..36: note = Synthetic oligonucleotide
  source 1..36: mol_type = other DNA

SEQ ID NO: 30446 - DNA, 36 bp, synthetic construct; identical to SEQ ID NO: 14644
  misc_feature 1..36: note = Synthetic oligonucleotide
  source 1..36: mol_type = other DNA

SEQ ID NO: 30447 - DNA, 36 bp, synthetic construct; identical to SEQ ID NO: 14644
  misc_feature 1..36: note = Synthetic oligonucleotide
  source 1..36: mol_type = other DNA

SEQ ID NO: 30448 - DNA, 36 bp, synthetic construct; identical to SEQ ID NO: 14644
  misc_feature 1..36: note = Synthetic oligonucleotide
  source 1..36: mol_type = other DNA

SEQ ID NO: 30449 - DNA, 36 bp, synthetic construct; identical to SEQ ID NO: 14644
  misc_feature 1..36: note = Synthetic oligonucleotide
  source 1..36: mol_type = other DNA

SEQ ID NO: 30450 - DNA, 36 bp, synthetic construct; identical to SEQ ID NO: 14644
  misc_feature 1..36: note = Synthetic oligonucleotide
  source 1..36: mol_type = other DNA

SEQ ID NO: 30451 - DNA, 36 bp, synthetic construct; identical to SEQ ID NO: 14644
  misc_feature 1..36: note = Synthetic oligonucleotide
  source 1..36: mol_type = other DNA

SEQ ID NO: 30452 - DNA, 36 bp, synthetic construct; identical to SEQ ID NO: 14644
  misc_feature 1..36: note = Synthetic oligonucleotide
  source 1..36: mol_type = other DNA

SEQ ID NO: 30453 - DNA, 36 bp, synthetic construct; identical to SEQ ID NO: 14644
  misc_feature 1..36: note = Synthetic oligonucleotide
  source 1..36: mol_type = other DNA

SEQ ID NO: 30454 - DNA, 36 bp, synthetic construct; identical to SEQ ID NO: 14644
  misc_feature 1..36: note = Synthetic oligonucleotide
  source 1..36: mol_type = other DNA

SEQ ID NO: 30455 - DNA, 36 bp, synthetic construct; identical to SEQ ID NO: 14644
  misc_feature 1..36: note = Synthetic oligonucleotide
  source 1..36: mol_type = other DNA

SEQ ID NO: 30456 - DNA, 36 bp, synthetic construct; identical to SEQ ID NO: 14644
  misc_feature 1..36: note = Synthetic oligonucleotide
  source 1..36: mol_type = other DNA

SEQ ID NO: 30457 - DNA, 36 bp, synthetic construct; identical to SEQ ID NO: 14644
  misc_feature 1..36: note = Synthetic oligonucleotide
  source 1..36: mol_type = other DNA

SEQ ID NO: 30458 - DNA, 36 bp, synthetic construct; identical to SEQ ID NO: 14644
  misc_feature 1..36: note = Synthetic oligonucleotide
  source 1..36: mol_type = other DNA

SEQ ID NO: 30459 - DNA, 37 bp, synthetic construct
  misc_feature 1..37: note = Synthetic oligonucleotide
  source 1..37: mol_type = other DNA
gttttagagctgtgttgtttcgaatggttccaaaaca

SEQ ID NO: 30460 - DNA, 36 bp, synthetic construct; identical to SEQ ID NO: 14645
  misc_feature 1..36: note = Synthetic oligonucleotide
  source 1..36: mol_type = other DNA

SEQ ID NO: 30461 - DNA, 36 bp, synthetic construct
  misc_feature 1..36: note = Synthetic oligonucleotide
  source 1..36: mol_type = other DNA
gttttagaggtttacagaatcacactactctcaaac

SEQ ID NO: 30462 - DNA, 36 bp, synthetic construct; identical to SEQ ID NO: 30461
  misc_feature 1..36: note = Synthetic oligonucleotide
  source 1..36: mol_type = other DNA

SEQ ID NO: 30463 - DNA, 36 bp, synthetic construct; identical to SEQ ID NO: 30461
  misc_feature 1..36: note = Synthetic oligonucleotide
  source 1..36: mol_type = other DNA

SEQ ID NO: 30464 - DNA, 36 bp, synthetic construct; identical to SEQ ID NO: 30461
  misc_feature 1..36: note = Synthetic oligonucleotide
  source 1..36: mol_type = other DNA

SEQ ID NO: 30465 - DNA, 36 bp, synthetic construct; identical to SEQ ID NO: 30461
  misc_feature 1..36: note = Synthetic oligonucleotide
  source 1..36: mol_type = other DNA

SEQ ID NO: 30466 - DNA, 36 bp, synthetic construct
  misc_feature 1..36: note = Synthetic oligonucleotide
  source 1..36: mol_type = other DNA
gttttagaggtttacagaatgacactactctcaaac

SEQ ID NO: 30467 - DNA, 36 bp, synthetic construct; identical to SEQ ID NO: 14649
  misc_feature 1..36: note = Synthetic oligonucleotide
  source 1..36: mol_type = other DNA

SEQ ID NO: 30468 - DNA, 36 bp, synthetic construct; identical to SEQ ID NO: 14650
  misc_feature 1..36: note = Synthetic oligonucleotide
  source 1..36: mol_type = other DNA

SEQ ID NO: 30469 - DNA, 36 bp, synthetic construct; identical to SEQ ID NO: 14650
  misc_feature 1..36: note = Synthetic oligonucleotide
  source 1..36: mol_type = other DNA

SEQ ID NO: 30470 - DNA, 36 bp, synthetic construct; identical to SEQ ID NO: 14650
  misc_feature 1..36: note = Synthetic oligonucleotide
  source 1..36: mol_type = other DNA

SEQ ID NO: 30471 - DNA, 36 bp, synthetic construct; identical to SEQ ID NO: 14650
  misc_feature 1..36: note = Synthetic oligonucleotide
  source 1..36: mol_type = other DNA

SEQ ID NO: 30472 - DNA, 36 bp, synthetic construct; identical to SEQ ID NO: 14650
  misc_feature 1..36: note = Synthetic oligonucleotide
  source 1..36: mol_type = other DNA

SEQ ID NO: 30473 - DNA, 36 bp, synthetic construct; identical to SEQ ID NO: 14650
  misc_feature 1..36: note = Synthetic oligonucleotide
  source 1..36: mol_type = other DNA

SEQ ID NO: 30474 - DNA, 36 bp, synthetic construct; identical to SEQ ID NO: 14650
  misc_feature 1..36: note = Synthetic oligonucleotide
  source 1..36: mol_type = other DNA

SEQ ID NO: 30475 - DNA, 36 bp, synthetic construct; identical to SEQ ID NO: 14650
  misc_feature 1..36: note = Synthetic oligonucleotide
  source 1..36: mol_type = other DNA

SEQ ID NO: 30476 - DNA, 36 bp, synthetic construct; identical to SEQ ID NO: 14650
  misc_feature 1..36: note = Synthetic oligonucleotide
  source 1..36: mol_type = other DNA

SEQ ID NO: 30477 - DNA, 36 bp, synthetic construct; identical to SEQ ID NO: 14650
  misc_feature 1..36: note = Synthetic oligonucleotide
  source 1..36: mol_type = other DNA

SEQ ID NO: 30478 - DNA, 36 bp, synthetic construct; identical to SEQ ID NO: 14652
  misc_feature 1..36: note = Synthetic oligonucleotide
  source 1..36: mol_type = other DNA

SEQ ID NO: 30479 - DNA, 36 bp, synthetic construct; identical to SEQ ID NO: 14652
  misc_feature 1..36: note = Synthetic oligonucleotide
  source 1..36: mol_type = other DNA

SEQ ID NO: 30480 - DNA, 36 bp, synthetic construct
  misc_feature 1..36: note = Synthetic oligonucleotide
  source 1..36: mol_type = other DNA
gttttagagtagtattgttccaactgattacaaaac

SEQ ID NO: 30481 - DNA, 36 bp, synthetic construct
  misc_feature 1..36: note = Synthetic oligonucleotide
  source 1..36: mol_type = other DNA
gttttagagtcatgttgtttagaatggtaccaaaac

SEQ ID NO: 30482 - DNA, 36 bp, synthetic construct; identical to SEQ ID NO: 30481
  misc_feature 1..36: note = Synthetic oligonucleotide
  source 1..36: mol_type = other DNA

SEQ ID NO: 30483 - DNA, 36 bp, synthetic construct; identical to SEQ ID NO: 30481
  misc_feature 1..36: note = Synthetic oligonucleotide
  source 1..36: mol_type = other DNA

SEQ ID NO: 30484 - DNA, 36 bp, synthetic construct; identical to SEQ ID NO: 30481
  misc_feature 1..36: note = Synthetic oligonucleotide
  source 1..36: mol_type = other DNA

SEQ ID NO: 30485 - DNA, 36 bp, synthetic construct
  misc_feature 1..36: note = Synthetic oligonucleotide
  source 1..36: mol_type = other DNA
gttttagagttgtgtcattctgaatggtattaaaac

SEQ ID NO: 30486 - DNA, 36 bp, synthetic construct; identical to SEQ ID NO: 30485
  misc_feature 1..36: note = Synthetic oligonucleotide
  source 1..36: mol_type = other DNA

SEQ ID NO: 30487 - DNA, 36 bp, synthetic construct; identical to SEQ ID NO: 14659
  misc_feature 1..36: note = Synthetic oligonucleotide
  source 1..36: mol_type = other DNA

SEQ ID NO: 30488 - DNA, 36 bp, synthetic construct; identical to SEQ ID NO: 14660
  misc_feature 1..36: note = Synthetic oligonucleotide
  source 1..36: mol_type = other DNA

SEQ ID NO: 30489 - DNA, 19 bp, synthetic construct
  misc_feature 1..19: note = Synthetic oligonucleotide
  source 1..19: mol_type = other DNA
gttttagatgattgttaga

SEQ ID NO: 30490 - DNA, 36 bp, synthetic construct
  misc_feature 1..36: note = Synthetic oligonucleotide
  source 1..36: mol_type = other DNA
gttttagatgattgttagaacaatgaggtttagaac

SEQ ID NO: 30491 - DNA, 36 bp, synthetic construct
  misc_feature 1..36: note = Synthetic oligonucleotide
  source 1..36: mol_type = other DNA
gttttagatgattgttagatcaatgaggtttagacc

SEQ ID NO: 30492 - DNA, 36 bp, synthetic construct
  misc_feature 1..36: note = Synthetic oligonucleotide
  source 1..36: mol_type = other DNA
gttttagatgattgttagatcaatgaggtttagatc

SEQ ID NO: 30493 - DNA, 36 bp, synthetic construct
  misc_feature 1..36: note = Synthetic oligonucleotide
  source 1..36: mol_type = other DNA
gttttagatggttgttatatcaataaggcttagatc

SEQ ID NO: 30494 - DNA, 36 bp, synthetic construct
  misc_feature 1..36: note = Synthetic oligonucleotide
  source 1..36: mol_type = other DNA
gttttagatttctgttggatataggtaaactgatac

SEQ ID NO: 30495 - DNA, 36 bp, synthetic construct; identical to SEQ ID NO: 14670
  misc_feature 1..36: note = Synthetic oligonucleotide
  source 1..36: mol_type = other DNA

SEQ ID NO: 30496 - DNA, 37 bp, synthetic construct; identical to SEQ ID NO: 14671
  misc_feature 1..37: note = Synthetic oligonucleotide
  source 1..37: mol_type = other DNA

SEQ ID NO: 30497 - DNA, 35 bp, synthetic construct
  misc_feature 1..35: note = Synthetic oligonucleotide
  source 1..35: mol_type = other DNA
gttttaggagtatcttattttgaatggtaacaaaa

SEQ ID NO: 30498 - DNA, 36 bp, synthetic construct; identical to SEQ ID NO: 14674
  misc_feature 1..36: note = Synthetic oligonucleotide
  source 1..36: mol_type = other DNA

SEQ ID NO: 30499 - DNA, 36 bp, synthetic construct; identical to SEQ ID NO: 14674
  misc_feature 1..36: note = Synthetic oligonucleotide
  source 1..36: mol_type = other DNA

SEQ ID NO: 30500 - DNA, 36 bp, synthetic construct; identical to SEQ ID NO: 14674
  misc_feature 1..36: note = Synthetic oligonucleotide
  source 1..36: mol_type = other DNA

SEQ ID NO: 30501 - DNA, 36 bp, synthetic construct; identical to SEQ ID NO: 14674
  misc_feature 1..36: note = Synthetic oligonucleotide
  source 1..36: mol_type = other DNA

SEQ ID NO: 30502 - DNA, 36 bp, synthetic construct; identical to SEQ ID NO: 14674
  misc_feature 1..36: note = Synthetic oligonucleotide
  source 1..36: mol_type = other DNA

SEQ ID NO: 30503 - DNA, 36 bp, synthetic construct; identical to SEQ ID NO: 14674
  misc_feature 1..36: note = Synthetic oligonucleotide
  source 1..36: mol_type = other DNA

SEQ ID NO: 30504 - DNA, 36 bp, synthetic construct; identical to SEQ ID NO: 14674
  misc_feature 1..36: note = Synthetic oligonucleotide
  source 1..36: mol_type = other DNA

SEQ ID NO: 30505 - DNA, 36 bp, synthetic construct; identical to SEQ ID NO: 14674
  misc_feature 1..36: note = Synthetic oligonucleotide
  source 1..36: mol_type = other DNA

SEQ ID NO: 30506 - DNA, 36 bp, synthetic construct; identical to SEQ ID NO: 14674
  misc_feature 1..36: note = Synthetic oligonucleotide
  source 1..36: mol_type = other DNA

SEQ ID NO: 30507 - DNA, 36 bp, synthetic construct; identical to SEQ ID NO: 14674
  misc_feature 1..36: note = Synthetic oligonucleotide
  source 1..36: mol_type = other DNA

SEQ ID NO: 30508 - DNA, 36 bp, synthetic construct; identical to SEQ ID NO: 14674
  misc_feature 1..36: note = Synthetic oligonucleotide
  source 1..36: mol_type = other DNA

SEQ ID NO: 30509 - DNA, 36 bp, synthetic construct; identical to SEQ ID NO: 14674
  misc_feature 1..36: note = Synthetic oligonucleotide
  source 1..36: mol_type = other DNA

SEQ ID NO: 30510 - DNA, 36 bp, synthetic construct; identical to SEQ ID NO: 14674
  misc_feature 1..36: note = Synthetic oligonucleotide
  source 1..36: mol_type = other DNA

SEQ ID NO: 30511 - DNA, 36 bp, synthetic construct; identical to SEQ ID NO: 14674
  misc_feature 1..36: note = Synthetic oligonucleotide
  source 1..36: mol_type = other DNA

SEQ ID NO: 30512 - DNA, 36 bp, synthetic construct; identical to SEQ ID NO: 14674
  misc_feature 1..36: note = Synthetic oligonucleotide
  source 1..36: mol_type = other DNA

SEQ ID NO: 30513 - DNA, 36 bp, synthetic construct; identical to SEQ ID NO: 14674
  misc_feature 1..36: note = Synthetic oligonucleotide
  source 1..36: mol_type = other DNA

SEQ ID NO: 30514 - DNA, 36 bp, synthetic construct; identical to SEQ ID NO: 14674
  misc_feature 1..36: note = Synthetic oligonucleotide
  source 1..36: mol_type = other DNA

SEQ ID NO: 30515 - DNA, 36 bp, synthetic construct; identical to SEQ ID NO: 14674
  misc_feature 1..36: note = Synthetic oligonucleotide
  source 1..36: mol_type = other DNA

SEQ ID NO: 30516 - DNA, 36 bp, synthetic construct; identical to SEQ ID NO: 14674
  misc_feature 1..36: note = Synthetic oligonucleotide
  source 1..36: mol_type = other DNA

SEQ ID NO: 30517 - DNA, 38 bp, synthetic construct
  misc_feature 1..38: note = Synthetic oligonucleotide
  source 1..38: mol_type = other DNA
gttttaggagtatgttattttgaatggtaacaaaacta

SEQ ID NO: 30518 - DNA, 36 bp, synthetic construct
  misc_feature 1..36: note = Synthetic oligonucleotide
  source 1..36: mol_type = other DNA
gttttaggagtatgttattttgaatggtaataaaac

SEQ ID NO: 30519 - DNA, 36 bp, synthetic construct; identical to SEQ ID NO: 30518
  misc_feature 1..36: note = Synthetic oligonucleotide
  source 1..36: mol_type = other DNA

SEQ ID NO: 30520 - DNA, 36 bp, synthetic construct; identical to SEQ ID NO: 30518
  misc_feature 1..36: note = Synthetic oligonucleotide
  source 1..36: mol_type = other DNA

SEQ ID NO: 30521 - DNA, 36 bp, synthetic construct
  misc_feature 1..36: note = Synthetic oligonucleotide
  source 1..36: mol_type = other DNA
gttttaggatcctgtataatttgagagatatacaac

SEQ ID NO: 30522 - DNA, 36 bp, synthetic construct
  misc_feature 1..36: note = Synthetic oligonucleotide
  source 1..36: mol_type = other DNA
gttttaggatcctgtgtaattttagaggtatataac

SEQ ID NO: 30523 - DNA, 19 bp, synthetic construct
  misc_feature 1..19: note = Synthetic oligonucleotide
  source 1..19: mol_type = other DNA
gttttaggatgctgtgaaa

SEQ ID NO: 30524 - DNA, 36 bp, synthetic construct
  misc_feature 1..36: note = Synthetic oligonucleotide
  source 1..36: mol_type = other DNA
gttttaggatgctgtgaaatttgagtgttataaagc

SEQ ID NO: 30525 - DNA, 36 bp, synthetic construct; identical to SEQ ID NO: 30524
  misc_feature 1..36: note = Synthetic oligonucleotide
  source 1..36: mol_type = other DNA

SEQ ID NO: 30526 - DNA, 36 bp, synthetic construct
  misc_feature 1..36: note = Synthetic oligonucleotide
  source 1..36: mol_type = other DNA
gttttaggtctatgtaattttaaatgctaccattac

SEQ ID NO: 30527 - DNA, 34 bp, synthetic construct
  misc_feature 1..34: note = Synthetic oligonucleotide
  source 1..34: mol_type = other DNA
gttttaggtgtatgtaattttgaatggtaacaca

SEQ ID NO: 30528 - DNA, 36 bp, synthetic construct
  misc_feature 1..36: note = Synthetic oligonucleotide
  source 1..36: mol_type = other DNA
gttttagtaccctataaaattacactactctcaaac

SEQ ID NO: 30529 - DNA, 36 bp, synthetic construct; identical to SEQ ID NO: 30528
  misc_feature 1..36: note = Synthetic oligonucleotide
  source 1..36: mol_type = other DNA

SEQ ID NO: 30530 - DNA, 36 bp, synthetic construct; identical to SEQ ID NO: 30528
  misc_feature 1..36: note = Synthetic oligonucleotide
  source 1..36: mol_type = other DNA

SEQ ID NO: 30531 - DNA, 36 bp, synthetic construct; identical to SEQ ID NO: 30528
  misc_feature 1..36: note = Synthetic oligonucleotide
  source 1..36: mol_type = other DNA

SEQ ID NO: 30532 - DNA, 36 bp, synthetic construct; identical to SEQ ID NO: 30528
  misc_feature 1..36: note = Synthetic oligonucleotide
  source 1..36: mol_type = other DNA

SEQ ID NO: 30533 - DNA, 36 bp, synthetic construct; identical to SEQ ID NO: 30528
  misc_feature 1..36: note = Synthetic oligonucleotide
  source 1..36: mol_type = other DNA

SEQ ID NO: 30534 - DNA, 36 bp, synthetic construct; identical to SEQ ID NO: 14684
  misc_feature 1..36: note = Synthetic oligonucleotide
  source 1..36: mol_type = other DNA

SEQ ID NO: 30535 - DNA, 36 bp, synthetic construct; identical to SEQ ID NO: 14684
  misc_feature 1..36: note = Synthetic oligonucleotide
  source 1..36: mol_type = other DNA

SEQ ID NO: 30536 - DNA, 36 bp, synthetic construct; identical to SEQ ID NO: 14684
  misc_feature 1..36: note = Synthetic oligonucleotide
  source 1..36: mol_type = other DNA

SEQ ID NO: 30537 - DNA, 36 bp, synthetic construct; identical to SEQ ID NO: 14684
  misc_feature 1..36: note = Synthetic oligonucleotide
  source 1..36: mol_type = other DNA

SEQ ID NO: 30538 - DNA, 36 bp, synthetic construct; identical to SEQ ID NO: 14684
  misc_feature 1..36: note = Synthetic oligonucleotide
  source 1..36: mol_type = other DNA

SEQ ID NO: 30539 - DNA, 36 bp, synthetic construct; identical to SEQ ID NO: 14684
  misc_feature 1..36: note = Synthetic oligonucleotide
  source 1..36: mol_type = other DNA

SEQ ID NO: 30540 - DNA, 36 bp, synthetic construct; identical to SEQ ID NO: 14684
  misc_feature 1..36: note = Synthetic oligonucleotide
  source 1..36: mol_type = other DNA

SEQ ID NO: 30541 - DNA, 36 bp, synthetic construct
  misc_feature 1..36: note = Synthetic oligonucleotide
  source 1..36: mol_type = other DNA
gttttagtacctggaagaattgagtcatcataaaac

SEQ ID NO: 30542 - DNA, 36 bp, synthetic construct; identical to SEQ ID NO: 30541
  misc_feature 1..36: note = Synthetic oligonucleotide
  source 1..36: mol_type = other DNA

SEQ ID NO: 30543 - DNA, 36 bp, synthetic construct; identical to SEQ ID NO: 30541
  misc_feature 1..36: note = Synthetic oligonucleotide
  source 1..36: mol_type = other DNA

SEQ ID NO: 30544 - DNA, 36 bp, synthetic construct; identical to SEQ ID NO: 30541
  misc_feature 1..36: note = Synthetic oligonucleotide
  source 1..36: mol_type = other DNA

SEQ ID NO: 30545 - DNA, 36 bp, synthetic construct
  misc_feature 1..36: note = Synthetic oligonucleotide
  source 1..36: mol_type = other DNA
gttttagtacctggaggaattgagtcatcataaaac

SEQ ID NO: 30546 - DNA, 36 bp, synthetic construct
  misc_feature 1..36: note = Synthetic oligonucleotide
  source 1..36: mol_type = other DNA
gttttagtaccttgtaaaatttaagtaagataaaat

SEQ ID NO: 30547 - DNA, 36 bp, synthetic construct
  misc_feature 1..36: note = Synthetic oligonucleotide
  source 1..36: mol_type = other DNA
gttttagtactattaaaaattacacaactctcaaac

SEQ ID NO: 30548 - DNA, 36 bp, synthetic construct
  misc_feature 1..36: note = Synthetic oligonucleotide
  source 1..36: mol_type = other DNA
gttttagtactctaaggattaaagctattgtaaaag

SEQ ID NO: 30549 - DNA, 36 bp, synthetic construct
  misc_feature 1..36: note = Synthetic oligonucleotide
  source 1..36: mol_type = other DNA
gttttagtactctgtagttttaggtataagtgagat

SEQ ID NO: 30550 - DNA, 36 bp, synthetic construct; identical to SEQ ID NO: 14695
  misc_feature 1..36: note = Synthetic oligonucleotide
  source 1..36: mol_type = other DNA

SEQ ID NO: 30551 - DNA, 36 bp, synthetic construct
  misc_feature 1..36: note = Synthetic oligonucleotide
  source 1..36: mol_type = other DNA
gttttagtactctgttggatattgataaacttatac

SEQ ID NO: 30552 - DNA, 36 bp, synthetic construct; identical to SEQ ID NO: 30551
  misc_feature 1..36: note = Synthetic oligonucleotide
  source 1..36: mol_type = other DNA

SEQ ID NO: 30553 - DNA, 36 bp, synthetic construct; identical to SEQ ID NO: 14696
  misc_feature 1..36: note = Synthetic oligonucleotide
  source 1..36: mol_type = other DNA

SEQ ID NO: 30554 - DNA, 36 bp, synthetic construct; identical to SEQ ID NO: 14696
  misc_feature 1..36: note = Synthetic oligonucleotide
  source 1..36: mol_type = other DNA

SEQ ID NO: 30555 - DNA, 36 bp, synthetic construct; identical to SEQ ID NO: 14696
  misc_feature 1..36: note = Synthetic oligonucleotide
  source 1..36: mol_type = other DNA

SEQ ID NO: 30556 - DNA, 36 bp, synthetic construct; identical to SEQ ID NO: 14696
  misc_feature 1..36: note = Synthetic oligonucleotide
  source 1..36: mol_type = other DNA

SEQ ID NO: 30557 - DNA, 36 bp, synthetic construct
  misc_feature 1..36: note = Synthetic oligonucleotide
  source 1..36: mol_type = other DNA
gttttagtactctttaaaatcacactactctcaaac

SEQ ID NO: 30558 - DNA, 36 bp, synthetic construct
  misc_feature 1..36: note = Synthetic oligonucleotide
  source 1..36: mol_type = other DNA
gttttagtactttgtaaattcttaatgtgataaaac

SEQ ID NO: 30559 - DNA, 36 bp, synthetic construct; identical to SEQ ID NO: 30558
  misc_feature 1..36: note = Synthetic oligonucleotide
  source 1..36: mol_type = other DNA

SEQ ID NO: 30560 - DNA, 36 bp, synthetic construct
  misc_feature 1..36: note = Synthetic oligonucleotide
  source 1..36: mol_type = other DNA
gttttagtatcatgacatttttagtacctctaaaac

SEQ ID NO: 30561 - DNA, 36 bp, synthetic construct
  misc_feature 1..36: note = Synthetic oligonucleotide
  source 1..36: mol_type = other DNA
gttttagtattgtgttattttagatagtaataaaac

SEQ ID NO: 30562 - DNA, 36 bp, synthetic construct
  misc_feature 1..36: note = Synthetic oligonucleotide
  source 1..36: mol_type = other DNA
gttttagtcaccggagaatggacgctcggccgcaac

SEQ ID NO: 30563 - DNA, 36 bp, synthetic construct
  misc_feature 1..36: note = Synthetic oligonucleotide
  source 1..36: mol_type = other DNA
gttttagtcaccggagaatggacgctcggccgcacc

SEQ ID NO: 30564 - DNA, 36 bp, synthetic construct
  misc_feature 1..36: note = Synthetic oligonucleotide
  source 1..36: mol_type = other DNA
gttttagtcagcctactttggacgcagttcgacaac

SEQ ID NO: 30565 - DNA, 36 bp, synthetic construct
  misc_feature 1..36: note = Synthetic oligonucleotide
  source 1..36: mol_type = other DNA
gttttagtcccctataaatttacactactctcaaac

SEQ ID NO: 30566 - DNA, 36 bp, synthetic construct; identical to SEQ ID NO: 30565
  misc_feature 1..36: note = Synthetic oligonucleotide
  source 1..36: mol_type = other DNA

SEQ ID NO: 30567 - DNA, 36 bp, synthetic construct
  misc_feature 1..36: note = Synthetic oligonucleotide
  source 1..36: mol_type = other DNA
gttttagtcccttattaaattacactactctcaaac

SEQ ID NO: 30568 - DNA, 36 bp, synthetic construct; identical to SEQ ID NO: 14704
  misc_feature 1..36: note = Synthetic oligonucleotide
  source 1..36: mol_type = other DNA

SEQ ID NO: 30569 - DNA, 36 bp, synthetic construct
  misc_feature 1..36: note = Synthetic oligonucleotide
  source 1..36: mol_type = other DNA
gttttagtcgtctgttatttattggtaaggttatac

SEQ ID NO: 30570 - DNA, 36 bp, synthetic construct; identical to SEQ ID NO: 30569
  misc_feature 1..36: note = Synthetic oligonucleotide
  source 1..36: mol_type = other DNA

SEQ ID NO: 30571 - DNA, 36 bp, synthetic construct; identical to SEQ ID NO: 14707
  misc_feature 1..36: note = Synthetic oligonucleotide
  source 1..36: mol_type = other DNA

SEQ ID NO: 30572 - DNA, 36 bp, synthetic construct
  misc_feature 1..36: note = Synthetic oligonucleotide
  source 1..36: mol_type = other DNA
gttttagttccctaatgagttttggtatggtataat

SEQ ID NO: 30573 - DNA, 36 bp, synthetic construct; identical to SEQ ID NO: 14710
  misc_feature 1..36: note = Synthetic oligonucleotide
  source 1..36: mol_type = other DNA

SEQ ID NO: 30574 - DNA, 36 bp, synthetic construct
  misc_feature 1..36: note = Synthetic oligonucleotide
  source 1..36: mol_type = other DNA
gttttagttcccttttaatttttggtatggtataat

SEQ ID NO: 30575 - DNA, 36 bp, synthetic construct; identical to SEQ ID NO: 30574
  misc_feature 1..36: note = Synthetic oligonucleotide
  source 1..36: mol_type = other DNA

SEQ ID NO: 30576 - DNA, 36 bp, synthetic construct
  misc_feature 1..36: note = Synthetic oligonucleotide
  source 1..36: mol_type = other DNA
gttttagttctctgatgaatattgataaactaatac

SEQ ID NO: 30577 - DNA, 36 bp, synthetic construct
  misc_feature 1..36: note = Synthetic oligonucleotide
  source 1..36: mol_type = other DNA
gttttagttctctgatggatattgatagacttatac

SEQ ID NO: 30578 - DNA, 37 bp, synthetic construct
  misc_feature 1..37: note = Synthetic oligonucleotide
  source 1..37: mol_type = other DNA
gttttagttctctgatggatattgatagacttatacg

SEQ ID NO: 30579 - DNA, 36 bp, synthetic construct
  misc_feature 1..36: note = Synthetic oligonucleotide
  source 1..36: mol_type = other DNA
gttttagttctttgatggatattgataaacttatac

SEQ ID NO: 30580 - DNA, 36 bp, synthetic construct
  misc_feature 1..36: note = Synthetic oligonucleotide
  source 1..36: mol_type = other DNA
gttttagttgtatttagaataacataactctcaaac

SEQ ID NO: 30581 - DNA, 35 bp, synthetic construct
  misc_feature 1..35: note = Synthetic oligonucleotide
  source 1..35: mol_type = other DNA
gttttagtttactaaaattttccaaggtaataaaa

SEQ ID NO: 30582 - DNA, 36 bp, synthetic construct
  misc_feature 1..36: note = Synthetic oligonucleotide
  source 1..36: mol_type = other DNA
gttttagtttagccgattttgtaaggaaactatagc

SEQ ID NO: 30583 - DNA, 36 bp, synthetic construct
  misc_feature 1..36: note = Synthetic oligonucleotide
  source 1..36: mol_type = other DNA
gttttagtttcctatctttttttggtatgatataat

SEQ ID NO: 30584 - DNA, 36 bp, synthetic construct
  misc_feature 1..36: note = Synthetic oligonucleotide
  source 1..36: mol_type = other DNA
gttttagtttcttaattatttttggtatgatataat

SEQ ID NO: 30585 - DNA, 36 bp, synthetic construct; identical to SEQ ID NO: 14720
  misc_feature 1..36: note = Synthetic oligonucleotide
  source 1..36: mol_type = other DNA

SEQ ID NO: 30586 - DNA, 36 bp, synthetic construct
  misc_feature 1..36: note = Synthetic oligonucleotide
  source 1..36: mol_type = other DNA
gttttatagttacttaaatcttgagaatacaaaaac

SEQ ID NO: 30587 - DNA, 36 bp, synthetic construct; identical to SEQ ID NO: 30586
  misc_feature 1..36: note = Synthetic oligonucleotide
  source 1..36: mol_type = other DNA

SEQ ID NO: 30588 - DNA, 36 bp, synthetic construct; identical to SEQ ID NO: 30586
  misc_feature 1..36: note = Synthetic oligonucleotide
  source 1..36: mol_type = other DNA

SEQ ID NO: 30589 - DNA, 36 bp, synthetic construct; identical to SEQ ID NO: 14723
  misc_feature 1..36: note = Synthetic oligonucleotide
  source 1..36: mol_type = other DNA

SEQ ID NO: 30590 - DNA, 36 bp, synthetic construct; identical to SEQ ID NO: 14727
  misc_feature 1..36: note = Synthetic oligonucleotide
  source 1..36: mol_type = other DNA

SEQ ID NO: 30591 - DNA, 36 bp, synthetic construct; identical to SEQ ID NO: 14727
  misc_feature 1..36: note = Synthetic oligonucleotide
  source 1..36: mol_type = other DNA

SEQ ID NO: 30592 - DNA, 36 bp, synthetic construct; identical to SEQ ID NO: 14727
  misc_feature 1..36: note = Synthetic oligonucleotide
  source 1..36: mol_type = other DNA

SEQ ID NO: 30593 - DNA, 36 bp, synthetic construct; identical to SEQ ID NO: 14728
  misc_feature 1..36: note = Synthetic oligonucleotide
  source 1..36: mol_type = other DNA

SEQ ID NO: 30594 - DNA, 36 bp, synthetic construct
  misc_feature 1..36: note = Synthetic oligonucleotide
  source 1..36: mol_type = other DNA
gttttatatcttatcaaattaacaaagttctcaaac

SEQ ID NO: 30595 - DNA, 36 bp, synthetic construct; identical to SEQ ID NO: 30594
  misc_feature 1..36: note = Synthetic oligonucleotide
  source 1..36: mol_type = other DNA

SEQ ID NO: 30596 - DNA, 36 bp, synthetic construct
  misc_feature 1..36: note = Synthetic oligonucleotide
  source 1..36: mol_type = other DNA
gttttatcacatcaaaagcttacaaggtaccaaaac

SEQ ID NO: 30597 - DNA, 36 bp, synthetic construct; identical to SEQ ID NO: 14729
  misc_feature 1..36: note = Synthetic oligonucleotide
  source 1..36: mol_type = other DNA

SEQ ID NO: 30598 - DNA, 36 bp, synthetic construct; identical to SEQ ID NO: 14729
  misc_feature 1..36: note = Synthetic oligonucleotide
  source 1..36: mol_type = other DNA

SEQ ID NO: 30599 - DNA, 36 bp, synthetic construct; identical to SEQ ID NO: 14729
  misc_feature 1..36: note = Synthetic oligonucleotide
  source 1..36: mol_type = other DNA

SEQ ID NO: 30600 - DNA, 36 bp, synthetic construct
  misc_feature 1..36: note = Synthetic oligonucleotide
  source 1..36: mol_type = other DNA
gttttatcactatctaaaataacacaattctaaaac

SEQ ID NO: 30601 - DNA, 36 bp, synthetic construct
  misc_feature 1..36: note = Synthetic oligonucleotide
  source 1..36: mol_type = other DNA
gttttatcatactcaaatttaacaacatcctaaaac

SEQ ID NO: 30602 - DNA, 36 bp, synthetic construct; identical to SEQ ID NO: 14732
  misc_feature 1..36: note = Synthetic oligonucleotide
  source 1..36: mol_type = other DNA

SEQ ID NO: 30603 - DNA, 36 bp, synthetic construct; identical to SEQ ID NO: 14732
  misc_feature 1..36: note = Synthetic oligonucleotide
  source 1..36: mol_type = other DNA

SEQ ID NO: 30604 - DNA, 36 bp, synthetic construct
  misc_feature 1..36: note = Synthetic oligonucleotide
  source 1..36: mol_type = other DNA
gttttatgatgacccaattctttcaggtactaaaac

SEQ ID NO: 30605 - DNA, 36 bp, synthetic construct; identical to SEQ ID NO: 30604
  misc_feature 1..36: note = Synthetic oligonucleotide
  source 1..36: mol_type = other DNA

SEQ ID NO: 30606 - DNA, 36 bp, synthetic construct
  misc_feature 1..36: note = Synthetic oligonucleotide
  source 1..36: mol_type = other DNA
gttttatgatgactcaattcttccaggtactaaaac

SEQ ID NO: 30607 - DNA, 36 bp, synthetic construct; identical to SEQ ID NO: 14733
  misc_feature 1..36: note = Synthetic oligonucleotide
  source 1..36: mol_type = other DNA

SEQ ID NO: 30608 - DNA, 36 bp, synthetic construct; identical to SEQ ID NO: 14733
  misc_feature 1..36: note = Synthetic oligonucleotide
  source 1..36: mol_type = other DNA

SEQ ID NO: 30609 - DNA, 36 bp, synthetic construct; identical to SEQ ID NO: 14733
  misc_feature 1..36: note = Synthetic oligonucleotide
  source 1..36: mol_type = other DNA

SEQ ID NO: 30610 - DNA, 36 bp, synthetic construct; identical to SEQ ID NO: 14733
  misc_feature 1..36: note = Synthetic oligonucleotide
  source 1..36: mol_type = other DNA

SEQ ID NO: 30611 - DNA, 36 bp, synthetic construct; identical to SEQ ID NO: 14733
  misc_feature 1..36: note = Synthetic oligonucleotide
  source 1..36: mol_type = other DNA

SEQ ID NO: 30612 - DNA, 36 bp, synthetic construct; identical to SEQ ID NO: 14733
  misc_feature 1..36: note = Synthetic oligonucleotide
  source 1..36: mol_type = other DNA

SEQ ID NO: 30613 - DNA, 36 bp, synthetic construct; identical to SEQ ID NO: 14733
  misc_feature 1..36: note = Synthetic oligonucleotide
  source 1..36: mol_type = other DNA

SEQ ID NO: 30614 - DNA, 36 bp, synthetic construct; identical to SEQ ID NO: 14733
  misc_feature 1..36: note = Synthetic oligonucleotide
  source 1..36: mol_type = other DNA

SEQ ID NO: 30615 - DNA, 36 bp, synthetic construct; identical to SEQ ID NO: 14734
  misc_feature 1..36: note = Synthetic oligonucleotide
  source 1..36: mol_type = other DNA

SEQ ID NO: 30616 - DNA, 36 bp, synthetic construct; identical to SEQ ID NO: 14734
  misc_feature 1..36: note = Synthetic oligonucleotide
  source 1..36: mol_type = other DNA

SEQ ID NO: 30617 - DNA, 36 bp, synthetic construct; identical to SEQ ID NO: 14734
  misc_feature 1..36: note = Synthetic oligonucleotide
  source 1..36: mol_type = other DNA

SEQ ID NO: 30618 - DNA, 36 bp, synthetic construct; identical to SEQ ID NO: 14734
  misc_feature 1..36: note = Synthetic oligonucleotide
  source 1..36: mol_type = other DNA

SEQ ID NO: 30619 - DNA, 36 bp, synthetic construct
  misc_feature 1..36: note = Synthetic oligonucleotide
  source 1..36: mol_type = other DNA
gttttattactatctaaaataacacaattctaaaac

SEQ ID NO: 30620 - DNA, 36 bp, synthetic construct
  misc_feature 1..36: note = Synthetic oligonucleotide
  source 1..36: mol_type = other DNA
gttttattactctataaatttacactactctcaaac

SEQ ID NO: 30621 - DNA, 36 bp, synthetic construct
  misc_feature 1..36: note = Synthetic oligonucleotide
  source 1..36: mol_type = other DNA
gttttattctagcaaaaaatcatatgataacaaaac

SEQ ID NO: 30622 - DNA, 36 bp, synthetic construct
  misc_feature 1..36: note = Synthetic oligonucleotide
  source 1..36: mol_type = other DNA
gttttattctagcaaaaaatcatatggtaacaaaac

SEQ ID NO: 30623 - DNA, 36 bp, synthetic construct; identical to SEQ ID NO: 30622
  misc_feature 1..36: note = Synthetic oligonucleotide
  source 1..36: mol_type = other DNA

SEQ ID NO: 30624 - DNA, 36 bp, synthetic construct
  misc_feature 1..36: note = Synthetic oligonucleotide
  source 1..36: mol_type = other DNA
gttttattttaccaatgaatgtccgagagctaaaac

SEQ ID NO: 30625 - DNA, 36 bp, synthetic construct
  misc_feature 1..36: note = Synthetic oligonucleotide
  source 1..36: mol_type = other DNA
gttttattttagccgattttgtaaggaaactatagc

SEQ ID NO: 30626 - DNA, 36 bp, synthetic construct; identical to SEQ ID NO: 14738
  misc_feature 1..36: note = Synthetic oligonucleotide
  source 1..36: mol_type = other DNA

SEQ ID NO: 30627 - DNA, 36 bp, synthetic construct
  misc_feature 1..36: note = Synthetic oligonucleotide
  source 1..36: mol_type = other DNA
gttttcgtcccctcacggggatttctctttttctat

SEQ ID NO: 30628 - DNA, 36 bp, synthetic construct
  misc_feature 1..36: note = Synthetic oligonucleotide
  source 1..36: mol_type = other DNA
gttttgaaggagacctgaaggagaagggattgaaac

SEQ ID NO: 30629 - DNA, 36 bp, synthetic construct
  misc_feature 1..36: note = Synthetic oligonucleotide
  source 1..36: mol_type = other DNA
gttttgaatccttccgtattaacaagactctcaaac

SEQ ID NO: 30630 - DNA, 36 bp, synthetic construct; identical to SEQ ID NO: 14742
  misc_feature 1..36: note = Synthetic oligonucleotide
  source 1..36: mol_type = other DNA

SEQ ID NO: 30631 - DNA, 36 bp, synthetic construct
  misc_feature 1..36: note = Synthetic oligonucleotide
  source 1..36: mol_type = other DNA
gttttgacaccacctctagaagcagtttgatacaat

SEQ ID NO: 30632 - DNA, 36 bp, synthetic construct
  misc_feature 1..36: note = Synthetic oligonucleotide
  source 1..36: mol_type = other DNA
gttttgacaccacctctagaagcagtttgatataat

SEQ ID NO: 30633 - DNA, 36 bp, synthetic construct
  misc_feature 1..36: note = Synthetic oligonucleotide
  source 1..36: mol_type = other DNA
gttttgaccttgctcccacaggagcaatttaagtat

SEQ ID NO: 30634 - DNA, 36 bp, synthetic construct; identical to SEQ ID NO: 14748
  misc_feature 1..36: note = Synthetic oligonucleotide
  source 1..36: mol_type = other DNA

SEQ ID NO: 30635 - DNA, 36 bp, synthetic construct
  misc_feature 1..36: note = Synthetic oligonucleotide
  source 1..36: mol_type = other DNA
gttttgacgtcactaagaaatgagttctttcaaaat

SEQ ID NO: 30636 - DNA, 36 bp, synthetic construct
  misc_feature 1..36: note = Synthetic oligonucleotide
  source 1..36: mol_type = other DNA
gttttgactccccctttaaaagacttgtgatataat

SEQ ID NO: 30637 - DNA, 36 bp, synthetic construct
  misc_feature 1..36: note = Synthetic oligonucleotide
  source 1..36: mol_type = other DNA
gttttgactccccctttgaaagacttgtgatataat

SEQ ID NO: 30638 - DNA, 36 bp, synthetic construct
  misc_feature 1..36: note = Synthetic oligonucleotide
  source 1..36: mol_type = other DNA
gttttgactccctctttgaaagacttgtgatagaat

SEQ ID NO: 30639 - DNA, 36 bp, synthetic construct
  misc_feature 1..36: note = Synthetic oligonucleotide
  source 1..36: mol_type = other DNA
gttttgacttcaccccccggagaagtcaggtacaat

SEQ ID NO: 30640 - DNA, 36 bp, synthetic construct; identical to SEQ ID NO: 14750
  misc_feature 1..36: note = Synthetic oligonucleotide
  source 1..36: mol_type = other DNA

SEQ ID NO: 30641 - DNA, 36 bp, synthetic construct; identical to SEQ ID NO: 14750
  misc_feature 1..36: note = Synthetic oligonucleotide
  source 1..36: mol_type = other DNA

SEQ ID NO: 30642 - DNA, 36 bp, synthetic construct
  misc_feature 1..36: note = Synthetic oligonucleotide
  source 1..36: mol_type = other DNA
gttttgacttcaccccccggcgaggtctgctacaat

SEQ ID NO: 30643 - DNA, 36 bp, synthetic construct; identical to SEQ ID NO: 14753
  misc_feature 1..36: note = Synthetic oligonucleotide
  source 1..36: mol_type = other DNA

SEQ ID NO: 30644 - DNA, 21 bp, synthetic construct
  misc_feature 1..21: note = Synthetic oligonucleotide
  source 1..21: mol_type = other DNA
gttttgacttcacccccctgc

SEQ ID NO: 30645 - DNA, 36 bp, synthetic construct
  misc_feature 1..36: note = Synthetic oligonucleotide
  source 1..36: mol_type = other DNA
gttttgacttccccccccggcgagggtggatatagt

SEQ ID NO: 30646 - DNA, 36 bp, synthetic construct
  misc_feature 1..36: note = Synthetic oligonucleotide
  source 1..36: mol_type = other DNA
gttttgactttacaacaaaatgttctttttcaaaat

SEQ ID NO: 30647 - DNA, 36 bp, synthetic construct; identical to SEQ ID NO: 14759
  misc_feature 1..36: note = Synthetic oligonucleotide
  source 1..36: mol_type = other DNA

SEQ ID NO: 30648 - DNA, 36 bp, synthetic construct
  misc_feature 1..36: note = Synthetic oligonucleotide
  source 1..36: mol_type = other DNA
gttttgactttacaacaaattgttctttctaaaaat

SEQ ID NO: 30649 - DNA, 36 bp, synthetic construct; identical to SEQ ID NO: 30648
  misc_feature 1..36: note = Synthetic oligonucleotide
  source 1..36: mol_type = other DNA

SEQ ID NO: 30650 - DNA, 36 bp, synthetic construct; identical to SEQ ID NO: 30648
  misc_feature 1..36: note = Synthetic oligonucleotide
  source 1..36: mol_type = other DNA

SEQ ID NO: 30651 - DNA, 36 bp, synthetic construct
  misc_feature 1..36: note = Synthetic oligonucleotide
  source 1..36: mol_type = other DNA
gttttgactttacaacataatgttctttccaagaat

SEQ ID NO: 30652 - DNA, 36 bp, synthetic construct
  misc_feature 1..36: note = Synthetic oligonucleotide
  source 1..36: mol_type = other DNA
gttttgagcctaccgcattagaaggcaagctataat

SEQ ID NO: 30653 - DNA, 36 bp, synthetic construct; identical to SEQ ID NO: 30652
  misc_feature 1..36: note = Synthetic oligonucleotide
  source 1..36: mol_type = other DNA

SEQ ID NO: 30654 - DNA, 36 bp, synthetic construct
  misc_feature 1..36: note = Synthetic oligonucleotide
  source 1..36: mol_type = other DNA
gttttgatcgtgcccccaacggggccatttgttatt

SEQ ID NO: 30655 - DNA, 36 bp, synthetic construct
  misc_feature 1..36: note = Synthetic oligonucleotide
  source 1..36: mol_type = other DNA
gttttgatcgtgcccccaccggggcgttctgctaag

SEQ ID NO: 30656 - DNA, 36 bp, synthetic construct
  misc_feature 1..36: note = Synthetic oligonucleotide
  source 1..36: mol_type = other DNA
gttttgatctcgcccccaccggggcactgtggtaag

SEQ ID NO: 30657 - DNA, 36 bp, synthetic construct
  misc_feature 1..36: note = Synthetic oligonucleotide
  source 1..36: mol_type = other DNA
gttttgatctcgccccccacagggcatttcggctac

SEQ ID NO: 30658 - DNA, 36 bp, synthetic construct
  misc_feature 1..36: note = Synthetic oligonucleotide
  source 1..36: mol_type = other DNA
gttttgatctcgccccccacggggcaatttggtaag

SEQ ID NO: 30659 - DNA, 36 bp, synthetic construct; identical to SEQ ID NO: 30658
  misc_feature 1..36: note = Synthetic oligonucleotide
  source 1..36: mol_type = other DNA

SEQ ID NO: 30660 - DNA, 36 bp, synthetic construct
  misc_feature 1..36: note = Synthetic oligonucleotide
  source 1..36: mol_type = other DNA
gttttgatctcgccccccacggggcaatttggtatg

SEQ ID NO: 30661 - DNA, 37 bp, synthetic construct
  misc_feature 1..37: note = Synthetic oligonucleotide
  source 1..37: mol_type = other DNA
gttttgatctcgccccccccggggcattgtggtatcc

SEQ ID NO: 30662 - DNA, 36 bp, synthetic construct; identical to SEQ ID NO: 14766
  misc_feature 1..36: note = Synthetic oligonucleotide
  source 1..36: mol_type = other DNA

SEQ ID NO: 30663 - DNA, 36 bp, synthetic construct
  misc_feature 1..36: note = Synthetic oligonucleotide
  source 1..36: mol_type = other DNA
gttttgatttacaattaatttaaaatatgttataat

SEQ ID NO: 30664 - DNA, 36 bp, synthetic construct
  misc_feature 1..36: note = Synthetic oligonucleotide
  source 1..36: mol_type = other DNA
gttttgatttactcttaatttaaaatatgttataat

SEQ ID NO: 30665 - DNA, 36 bp, synthetic construct
  misc_feature 1..36: note = Synthetic oligonucleotide
  source 1..36: mol_type = other DNA
gttttgatttactgttagtttaaactatgttataat

SEQ ID NO: 30666 - DNA, 36 bp, synthetic construct
  misc_feature 1..36: note = Synthetic oligonucleotide
  source 1..36: mol_type = other DNA
gttttgcaccttactgaattaacaaggctctcaaac

SEQ ID NO: 30667 - DNA, 36 bp, synthetic construct; identical to SEQ ID NO: 30666
  misc_feature 1..36: note = Synthetic oligonucleotide
  source 1..36: mol_type = other DNA

SEQ ID NO: 30668 - DNA, 36 bp, synthetic construct; identical to SEQ ID NO: 14773
  misc_feature 1..36: note = Synthetic oligonucleotide
  source 1..36: mol_type = other DNA

SEQ ID NO: 30669 - DNA, 36 bp, synthetic construct; identical to SEQ ID NO: 14773
  misc_feature 1..36: note = Synthetic oligonucleotide
  source 1..36: mol_type = other DNA

SEQ ID NO: 30670 - DNA, 36 bp, synthetic construct; identical to SEQ ID NO: 14773
  misc_feature 1..36: note = Synthetic oligonucleotide
  source 1..36: mol_type = other DNA

SEQ ID NO: 30671 - DNA, 37 bp, synthetic construct
  misc_feature 1..37: note = Synthetic oligonucleotide
  source 1..37: mol_type = other DNA
gttttgcatctttctgaattaacaaagctctcaaacc

SEQ ID NO: 30672 - DNA, 36 bp, synthetic construct
  misc_feature 1..36: note = Synthetic oligonucleotide
  source 1..36: mol_type = other DNA
gttttgccttccccccagaggcaagtgatgtagaat

SEQ ID NO: 30673 - DNA, 36 bp, synthetic construct
  misc_feature 1..36: note = Synthetic oligonucleotide
  source 1..36: mol_type = other DNA
gttttgccttccccccagaggcgcgactggtagaat

SEQ ID NO: 30674 - DNA, 36 bp, synthetic construct; identical to SEQ ID NO: 30673
  misc_feature 1..36: note = Synthetic oligonucleotide
  source 1..36: mol_type = other DNA

SEQ ID NO: 30675 - DNA, 36 bp, synthetic construct
  misc_feature 1..36: note = Synthetic oligonucleotide
  source 1..36: mol_type = other DNA
gttttgccttccccccccggaagagcggcttaaact

SEQ ID NO: 30676 - DNA, 36 bp, synthetic construct
  misc_feature 1..36: note = Synthetic oligonucleotide
  source 1..36: mol_type = other DNA
gttttgccttccccccggaagcacgtgaggtagaat

SEQ ID NO: 30677 - DNA, 36 bp, synthetic construct; identical to SEQ ID NO: 30676
  misc_feature 1..36: note = Synthetic oligonucleotide
  source 1..36: mol_type = other DNA

SEQ ID NO: 30678 - DNA, 36 bp, synthetic construct; identical to SEQ ID NO: 30676
  misc_feature 1..36: note = Synthetic oligonucleotide
  source 1..36: mol_type = other DNA

SEQ ID NO: 30679 - DNA, 36 bp, synthetic construct; identical to SEQ ID NO: 14779
  misc_feature 1..36: note = Synthetic oligonucleotide
  source 1..36: mol_type = other DNA

SEQ ID NO: 30680 - DNA, 36 bp, synthetic construct
  misc_feature 1..36: note = Synthetic oligonucleotide
  source 1..36: mol_type = other DNA
gttttgccttccccccggaggccgggccgttagaat

SEQ ID NO: 30681 - DNA, 36 bp, synthetic construct; identical to SEQ ID NO: 30680
  misc_feature 1..36: note = Synthetic oligonucleotide
  source 1..36: mol_type = other DNA

SEQ ID NO: 30682 - DNA, 36 bp, synthetic construct
  misc_feature 1..36: note = Synthetic oligonucleotide
  source 1..36: mol_type = other DNA
gttttgccttccccccggaggcgcgagcgatacaat

SEQ ID NO: 30683 - DNA, 36 bp, synthetic construct
  misc_feature 1..36: note = Synthetic oligonucleotide
  source 1..36: mol_type = other DNA
gttttgccttccccccggaggcgcgcgtggcagaat

SEQ ID NO: 30684 - DNA, 36 bp, synthetic construct; identical to SEQ ID NO: 14782
  misc_feature 1..36: note = Synthetic oligonucleotide
  source 1..36: mol_type = other DNA

SEQ ID NO: 30685 - DNA, 36 bp, synthetic construct
  misc_feature 1..36: note = Synthetic oligonucleotide
  source 1..36: mol_type = other DNA
gttttgccttccccccggaggcgggtgatttagaat

SEQ ID NO: 30686 - DNA, 36 bp, synthetic construct
  misc_feature 1..36: note = Synthetic oligonucleotide
  source 1..36: mol_type = other DNA
gttttgccttccccccggaggcgggtgctgtaaaat

SEQ ID NO: 30687 - DNA, 36 bp, synthetic construct
  misc_feature 1..36: note = Synthetic oligonucleotide
  source 1..36: mol_type = other DNA
gttttgccttgaatccaaaataaggcacagtacaac

SEQ ID NO: 30688 - DNA, 36 bp, synthetic construct; identical to SEQ ID NO: 30687
  misc_feature 1..36: note = Synthetic oligonucleotide
  source 1..36: mol_type = other DNA

SEQ ID NO: 30689 - DNA, 36 bp, synthetic construct; identical to SEQ ID NO: 14783
  misc_feature 1..36: note = Synthetic oligonucleotide
  source 1..36: mol_type = other DNA

SEQ ID NO: 30690 - DNA, 36 bp, synthetic construct; identical to SEQ ID NO: 14783
  misc_feature 1..36: note = Synthetic oligonucleotide
  source 1..36: mol_type = other DNA

SEQ ID NO: 30691 - DNA, 36 bp, synthetic construct; identical to SEQ ID NO: 14783
  misc_feature 1..36: note = Synthetic oligonucleotide
  source 1..36: mol_type = other DNA

SEQ ID NO: 30692 - DNA, 36 bp, synthetic construct; identical to SEQ ID NO: 14783
  misc_feature 1..36: note = Synthetic oligonucleotide
  source 1..36: mol_type = other DNA

SEQ ID NO: 30693 - DNA, 36 bp, synthetic construct; identical to SEQ ID NO: 14783
  misc_feature 1..36: note = Synthetic oligonucleotide
  source 1..36: mol_type = other DNA

SEQ ID NO: 30694 - DNA, 36 bp, synthetic construct; identical to SEQ ID NO: 14783
  misc_feature 1..36: note = Synthetic oligonucleotide
  source 1..36: mol_type = other DNA

SEQ ID NO: 30695 - DNA, 36 bp, synthetic construct; identical to SEQ ID NO: 14783
  misc_feature 1..36: note = Synthetic oligonucleotide
  source 1..36: mol_type = other DNA

SEQ ID NO: 30696 - DNA, 36 bp, synthetic construct; identical to SEQ ID NO: 14783
  misc_feature 1..36: note = Synthetic oligonucleotide
  source 1..36: mol_type = other DNA

SEQ ID NO: 30697 - DNA, 36 bp, synthetic construct; identical to SEQ ID NO: 14783
  misc_feature 1..36: note = Synthetic oligonucleotide
  source 1..36: mol_type = other DNA

SEQ ID NO: 30698 - DNA, 36 bp, synthetic construct
  misc_feature 1..36: note = Synthetic oligonucleotide
  source 1..36: mol_type = other DNA
gttttgccttgaatccaaaataaggcacagtacagt

SEQ ID NO: 30699 - DNA, 36 bp, synthetic construct
  misc_feature 1..36: note = Synthetic oligonucleotide
  source 1..36: mol_type = other DNA
gttttgccttgaatccaaaatcaagcatggcataac

SEQ ID NO: 30700 - DNA, 36 bp, synthetic construct; identical to SEQ ID NO: 14785
  misc_feature 1..36: note = Synthetic oligonucleotide
  source 1..36: mol_type = other DNA

SEQ ID NO: 30701 - DNA, 36 bp, synthetic construct; identical to SEQ ID NO: 14785
  misc_feature 1..36: note = Synthetic oligonucleotide
  source 1..36: mol_type = other DNA

SEQ ID NO: 30702 - DNA, 36 bp, synthetic construct; identical to SEQ ID NO: 14785
  misc_feature 1..36: note = Synthetic oligonucleotide
  source 1..36: mol_type = other DNA

SEQ ID NO: 30703 - DNA, 36 bp, synthetic construct; identical to SEQ ID NO: 14785
  misc_feature 1..36: note = Synthetic oligonucleotide
  source 1..36: mol_type = other DNA

SEQ ID NO: 30704 - DNA, 36 bp, synthetic construct
  misc_feature 1..36: note = Synthetic oligonucleotide
  source 1..36: mol_type = other DNA
gttttgctaccctaaagatttttgctacttataaac

SEQ ID NO: 30705 - DNA, 36 bp, synthetic construct; identical to SEQ ID NO: 14788
  misc_feature 1..36: note = Synthetic oligonucleotide
  source 1..36: mol_type = other DNA

SEQ ID NO: 30706 - DNA, 36 bp, synthetic construct
  misc_feature 1..36: note = Synthetic oligonucleotide
  source 1..36: mol_type = other DNA
gttttgctaccctcagaatttttgctatgtaaagac

SEQ ID NO: 30707 - DNA, 36 bp, synthetic construct
  misc_feature 1..36: note = Synthetic oligonucleotide
  source 1..36: mol_type = other DNA
gttttgctaccctccagttttttgctatgtgataac

SEQ ID NO: 30708 - DNA, 36 bp, synthetic construct; identical to SEQ ID NO: 30707
  misc_feature 1..36: note = Synthetic oligonucleotide
  source 1..36: mol_type = other DNA

SEQ ID NO: 30709 - DNA, 36 bp, synthetic construct
  misc_feature 1..36: note = Synthetic oligonucleotide
  source 1..36: mol_type = other DNA
gttttgctaccctcggaatttttgctgtataaagac

SEQ ID NO: 30710 - DNA, 26 bp, synthetic construct
  misc_feature 1..26: note = Synthetic oligonucleotide
  source 1..26: mol_type = other DNA
gttttggaaccatctggaatgacata

SEQ ID NO: 30711 - DNA, 36 bp, synthetic construct
  misc_feature 1..36: note = Synthetic oligonucleotide
  source 1..36: mol_type = other DNA
gttttggaaccatgtaaaagcaaatgattccaaatg

SEQ ID NO: 30712 - DNA, 36 bp, synthetic construct; identical to SEQ ID NO: 30711
  misc_feature 1..36: note = Synthetic oligonucleotide
  source 1..36: mol_type = other DNA

SEQ ID NO: 30713 - DNA, 36 bp, synthetic construct; identical to SEQ ID NO: 30711
  misc_feature 1..36: note = Synthetic oligonucleotide
  source 1..36: mol_type = other DNA

SEQ ID NO: 30714 - DNA, 36 bp, synthetic construct; identical to SEQ ID NO: 14792
  misc_feature 1..36: note = Synthetic oligonucleotide
  source 1..36: mol_type = other DNA

SEQ ID NO: 30715 - DNA, 36 bp, synthetic construct; identical to SEQ ID NO: 14792
  misc_feature 1..36: note = Synthetic oligonucleotide
  source 1..36: mol_type = other DNA

SEQ ID NO: 30716 - DNA, 36 bp, synthetic construct; identical to SEQ ID NO: 14792
  misc_feature 1..36: note = Synthetic oligonucleotide
  source 1..36: mol_type = other DNA

SEQ ID NO: 30717 - DNA, 36 bp, synthetic construct; identical to SEQ ID NO: 14792
  misc_feature 1..36: note = Synthetic oligonucleotide
  source 1..36: mol_type = other DNA

SEQ ID NO: 30718 - DNA, 36 bp, synthetic construct; identical to SEQ ID NO: 14792
  misc_feature 1..36: note = Synthetic oligonucleotide
  source 1..36: mol_type = other DNA

SEQ ID NO: 30719 - DNA, 36 bp, synthetic construct; identical to SEQ ID NO: 14792
  misc_feature 1..36: note = Synthetic oligonucleotide
  source 1..36: mol_type = other DNA

SEQ ID NO: 30720 - DNA, 36 bp, synthetic construct; identical to SEQ ID NO: 14792
  misc_feature 1..36: note = Synthetic oligonucleotide
  source 1..36: mol_type = other DNA

SEQ ID NO: 30721 - DNA, 36 bp, synthetic construct; identical to SEQ ID NO: 14792
  misc_feature 1..36: note = Synthetic oligonucleotide
  source 1..36: mol_type = other DNA

SEQ ID NO: 30722 - DNA, 36 bp, synthetic construct; identical to SEQ ID NO: 14792
  misc_feature 1..36: note = Synthetic oligonucleotide
  source 1..36: mol_type = other DNA

SEQ ID NO: 30723 - DNA, 36 bp, synthetic construct; identical to SEQ ID NO: 14792
  misc_feature 1..36: note = Synthetic oligonucleotide
  source 1..36: mol_type = other DNA

SEQ ID NO: 30724 - DNA, 36 bp, synthetic construct; identical to SEQ ID NO: 14792
  misc_feature 1..36: note = Synthetic oligonucleotide
  source 1..36: mol_type = other DNA

SEQ ID NO: 30725 - DNA, 36 bp, synthetic construct; identical to SEQ ID NO: 14792
  misc_feature 1..36: note = Synthetic oligonucleotide
  source 1..36: mol_type = other DNA

SEQ ID NO: 30726 - DNA, 36 bp, synthetic construct; identical to SEQ ID NO: 14792
  misc_feature 1..36: note = Synthetic oligonucleotide
  source 1..36: mol_type = other DNA

SEQ ID NO: 30727 - DNA, 36 bp, synthetic construct; identical to SEQ ID NO: 14792
  misc_feature 1..36: note = Synthetic oligonucleotide
  source 1..36: mol_type = other DNA

SEQ ID NO: 30728 - DNA, 36 bp, synthetic construct; identical to SEQ ID NO: 14792
  misc_feature 1..36: note = Synthetic oligonucleotide
  source 1..36: mol_type = other DNA

SEQ ID NO: 30729 - DNA, 36 bp, synthetic construct; identical to SEQ ID NO: 14792
  misc_feature 1..36: note = Synthetic oligonucleotide
  source 1..36: mol_type = other DNA

SEQ ID NO: 30730 - DNA, 36 bp, synthetic construct; identical to SEQ ID NO: 14792
  misc_feature 1..36: note = Synthetic oligonucleotide
  source 1..36: mol_type = other DNA

SEQ ID NO: 30731 - DNA, 36 bp, synthetic construct; identical to SEQ ID NO: 14792
  misc_feature 1..36: note = Synthetic oligonucleotide
  source 1..36: mol_type = other DNA

SEQ ID NO: 30732 - DNA, 36 bp, synthetic construct; identical to SEQ ID NO: 14792
  misc_feature 1..36: note = Synthetic oligonucleotide
  source 1..36: mol_type = other DNA

SEQ ID NO: 30733 - DNA, 36 bp, synthetic construct; identical to SEQ ID NO: 14792
  misc_feature 1..36: note = Synthetic oligonucleotide
  source 1..36: mol_type = other DNA

SEQ ID NO: 30734 - DNA, 36 bp, synthetic construct; identical to SEQ ID NO: 14792
  misc_feature 1..36: note = Synthetic oligonucleotide
  source 1..36: mol_type = other DNA

SEQ ID NO: 30735 - DNA, 36 bp, synthetic construct; identical to SEQ ID NO: 14792
  misc_feature 1..36: note = Synthetic oligonucleotide
  source 1..36: mol_type = other DNA

SEQ ID NO: 30736 - DNA, 36 bp, synthetic construct; identical to SEQ ID NO: 14792
  misc_feature 1..36: note = Synthetic oligonucleotide
  source 1..36: mol_type = other DNA

SEQ ID NO: 30737 - DNA, 36 bp, synthetic construct; identical to SEQ ID NO: 14792
  misc_feature 1..36: note = Synthetic oligonucleotide
  source 1..36: mol_type = other DNA

SEQ ID NO: 30738 - DNA, 36 bp, synthetic construct; identical to SEQ ID NO: 14792
  misc_feature 1..36: note = Synthetic oligonucleotide
  source 1..36: mol_type = other DNA

SEQ ID NO: 30739 - DNA, 36 bp, synthetic construct; identical to SEQ ID NO: 14792
  misc_feature 1..36: note = Synthetic oligonucleotide
  source 1..36: mol_type = other DNA

SEQ ID NO: 30740 - DNA, 36 bp, synthetic construct; identical to SEQ ID NO: 14792
  misc_feature 1..36: note = Synthetic oligonucleotide
  source 1..36: mol_type = other DNA

SEQ ID NO: 30741 - DNA, 36 bp, synthetic construct; identical to SEQ ID NO: 14792
  misc_feature 1..36: note = Synthetic oligonucleotide
  source 1..36: mol_type = other DNA

SEQ ID NO: 30742 - DNA, 36 bp, synthetic construct; identical to SEQ ID NO: 14792
  misc_feature 1..36: note = Synthetic oligonucleotide
  source 1..36: mol_type = other DNA

SEQ ID NO: 30743 - DNA, 36 bp, synthetic construct; identical to SEQ ID NO: 14792
  misc_feature 1..36: note = Synthetic oligonucleotide
  source 1..36: mol_type = other DNA

SEQ ID NO: 30744 - DNA, 36 bp, synthetic construct; identical to SEQ ID NO: 14792
  misc_feature 1..36: note = Synthetic oligonucleotide
  source 1..36: mol_type = other DNA

SEQ ID NO: 30745 - DNA, 36 bp, synthetic construct; identical to SEQ ID NO: 14792
  misc_feature 1..36: note = Synthetic oligonucleotide
  source 1..36: mol_type = other DNA

SEQ ID NO: 30746 - DNA, 36 bp, synthetic construct; identical to SEQ ID NO: 14792
  misc_feature 1..36: note = Synthetic oligonucleotide
  source 1..36: mol_type = other DNA

SEQ ID NO: 30747 - DNA, 36 bp, synthetic construct; identical to SEQ ID NO: 14792
  misc_feature 1..36: note = Synthetic oligonucleotide
  source 1..36: mol_type = other DNA

SEQ ID NO: 30748 - DNA, 36 bp, synthetic construct; identical to SEQ ID NO: 14792
  misc_feature 1..36: note = Synthetic oligonucleotide
  source 1..36: mol_type = other DNA

SEQ ID NO: 30749 - DNA, 36 bp, synthetic construct; identical to SEQ ID NO: 14792
  misc_feature 1..36: note = Synthetic oligonucleotide
  source 1..36: mol_type = other DNA

SEQ ID NO: 30750 - DNA, 36 bp, synthetic construct; identical to SEQ ID NO: 14792
  misc_feature 1..36: note = Synthetic oligonucleotide
  source 1..36: mol_type = other DNA

SEQ ID NO: 30751 - DNA, 36 bp, synthetic construct; identical to SEQ ID NO: 14792
  misc_feature 1..36: note = Synthetic oligonucleotide
  source 1..36: mol_type = other DNA

SEQ ID NO: 30752 - DNA, 36 bp, synthetic construct; identical to SEQ ID NO: 14792
  misc_feature 1..36: note = Synthetic oligonucleotide
  source 1..36: mol_type = other DNA

SEQ ID NO: 30753 - DNA, 36 bp, synthetic construct; identical to SEQ ID NO: 14792
  misc_feature 1..36: note = Synthetic oligonucleotide
  source 1..36: mol_type = other DNA

SEQ ID NO: 30754 - DNA, 36 bp, synthetic construct; identical to SEQ ID NO: 14794
  misc_feature 1..36: note = Synthetic oligonucleotide
  source 1..36: mol_type = other DNA

SEQ ID NO: 30755 - DNA, 36 bp, synthetic construct; identical to SEQ ID NO: 14794
  misc_feature 1..36: note = Synthetic oligonucleotide
  source 1..36: mol_type = other DNA

SEQ ID NO: 30756 - DNA, 36 bp, synthetic construct
  misc_feature 1..36: note = Synthetic oligonucleotide
  source 1..36: mol_type = other DNA
gttttggaaccattcgaaataacacagctctaaaac

SEQ ID NO: 30757 - DNA, 36 bp, synthetic construct; identical to SEQ ID NO: 30756
  misc_feature 1..36: note = Synthetic oligonucleotide
  source 1..36: mol_type = other DNA

SEQ ID NO: 30758 - DNA, 36 bp, synthetic construct; identical to SEQ ID NO: 30756
  misc_feature 1..36: note = Synthetic oligonucleotide
  source 1..36: mol_type = other DNA

SEQ ID NO: 30759 - DNA, 36 bp, synthetic construct
  misc_feature 1..36: note = Synthetic oligonucleotide
  source 1..36: mol_type = other DNA
gttttggaactagataaaacgacacaactctaaaac

SEQ ID NO: 30760 - DNA, 36 bp, synthetic construct; identical to SEQ ID NO: 14797
  misc_feature 1..36: note = Synthetic oligonucleotide
  source 1..36: mol_type = other DNA

SEQ ID NO: 30761 - DNA, 36 bp, synthetic construct; identical to SEQ ID NO: 14797
  misc_feature 1..36: note = Synthetic oligonucleotide
  source 1..36: mol_type = other DNA

SEQ ID NO: 30762 - DNA, 36 bp, synthetic construct; identical to SEQ ID NO: 14797
  misc_feature 1..36: note = Synthetic oligonucleotide
  source 1..36: mol_type = other DNA

SEQ ID NO: 30763 - DNA, 36 bp, synthetic construct; identical to SEQ ID NO: 14797
  misc_feature 1..36: note = Synthetic oligonucleotide
  source 1..36: mol_type = other DNA

SEQ ID NO: 30764 - DNA, 36 bp, synthetic construct; identical to SEQ ID NO: 14797
  misc_feature 1..36: note = Synthetic oligonucleotide
  source 1..36: mol_type = other DNA

SEQ ID NO: 30765 - DNA, 36 bp, synthetic construct; identical to SEQ ID NO: 14797
  misc_feature 1..36: note = Synthetic oligonucleotide
  source 1..36: mol_type = other DNA

SEQ ID NO: 30766 - DNA, 36 bp, synthetic construct; identical to SEQ ID NO: 14797
  misc_feature 1..36: note = Synthetic oligonucleotide
  source 1..36: mol_type = other DNA

SEQ ID NO: 30767 - DNA, 36 bp, synthetic construct
  misc_feature 1..36: note = Synthetic oligonucleotide
  source 1..36: mol_type = other DNA
gttttggaactattcgaaacaacacagctctaaaac

SEQ ID NO: 30768 - DNA, 36 bp, synthetic construct; identical to SEQ ID NO: 14798
  misc_feature 1..36: note = Synthetic oligonucleotide
  source 1..36: mol_type = other DNA

SEQ ID NO: 30769 - DNA, 36 bp, synthetic construct; identical to SEQ ID NO: 14800
  misc_feature 1..36: note = Synthetic oligonucleotide
  source 1..36: mol_type = other DNA

SEQ ID NO: 30770 - DNA, 36 bp, synthetic construct
  misc_feature 1..36: note = Synthetic oligonucleotide
  source 1..36: mol_type = other DNA
gttttggaattatgtcattccagatggttctactac

SEQ ID NO: 30771 - DNA, 36 bp, synthetic construct; identical to SEQ ID NO: 14802
  misc_feature 1..36: note = Synthetic oligonucleotide
  source 1..36: mol_type = other DNA

SEQ ID NO: 30772 - DNA, 36 bp, synthetic construct
  misc_feature 1..36: note = Synthetic oligonucleotide
  source 1..36: mol_type = other DNA
gttttggagcagtgacaaactgactggtagtcaaac

SEQ ID NO: 30773 - DNA, 36 bp, synthetic construct
  misc_feature 1..36: note = Synthetic oligonucleotide
  source 1..36: mol_type = other DNA
gttttggagcagtgccgttctgactggtaatcgcac

SEQ ID NO: 30774 - DNA, 36 bp, synthetic construct
  misc_feature 1..36: note = Synthetic oligonucleotide
  source 1..36: mol_type = other DNA
gttttggagcagtgtcaccctgactggtaatgaaac

SEQ ID NO: 30775 - DNA, 36 bp, synthetic construct; identical to SEQ ID NO: 14812
  misc_feature 1..36: note = Synthetic oligonucleotide
  source 1..36: mol_type = other DNA

SEQ ID NO: 30776 - DNA, 36 bp, synthetic construct; identical to SEQ ID NO: 14812
  misc_feature 1..36: note = Synthetic oligonucleotide
  source 1..36: mol_type = other DNA

SEQ ID NO: 30777 - DNA, 36 bp, synthetic construct; identical to SEQ ID NO: 14812
  misc_feature 1..36: note = Synthetic oligonucleotide
  source 1..36: mol_type = other DNA

SEQ ID NO: 30778 - DNA, 36 bp, synthetic construct; identical to SEQ ID NO: 14812
  misc_feature 1..36: note = Synthetic oligonucleotide
  source 1..36: mol_type = other DNA

SEQ ID NO: 30779 - DNA, 36 bp, synthetic construct; identical to SEQ ID NO: 14812
  misc_feature 1..36: note = Synthetic oligonucleotide
  source 1..36: mol_type = other DNA

SEQ ID NO: 30780 - DNA, 36 bp, synthetic construct
  misc_feature 1..36: note = Synthetic oligonucleotide
  source 1..36: mol_type = other DNA
gttttggagcagtgtcgatttaactggtaatcaaac

SEQ ID NO: 30781 - DNA, 36 bp, synthetic construct
  misc_feature 1..36: note = Synthetic oligonucleotide
  source 1..36: mol_type = other DNA
gttttggagcagtgtcgttctgactggtaatcaaac

SEQ ID NO: 30782 - DNA, 36 bp, synthetic construct
  misc_feature 1..36: note = Synthetic oligonucleotide
  source 1..36: mol_type = other DNA
gttttggagcagtgtcgttctgactggtaatccaac

SEQ ID NO: 30783 - DNA, 36 bp, synthetic construct
  misc_feature 1..36: note = Synthetic oligonucleotide
  source 1..36: mol_type = other DNA
gttttggaggcattcaattcaacacagctctaaaac

SEQ ID NO: 30784 - DNA, 36 bp, synthetic construct; identical to SEQ ID NO: 14813
  misc_feature 1..36: note = Synthetic oligonucleotide
  source 1..36: mol_type = other DNA

SEQ ID NO: 30785 - DNA, 36 bp, synthetic construct; identical to SEQ ID NO: 14815
  misc_feature 1..36: note = Synthetic oligonucleotide
  source 1..36: mol_type = other DNA

SEQ ID NO: 30786 - DNA, 36 bp, synthetic construct; identical to SEQ ID NO: 14815
  misc_feature 1..36: note = Synthetic oligonucleotide
  source 1..36: mol_type = other DNA

SEQ ID NO: 30787 - DNA, 36 bp, synthetic construct; identical to SEQ ID NO: 14815
  misc_feature 1..36: note = Synthetic oligonucleotide
  source 1..36: mol_type = other DNA

SEQ ID NO: 30788 - DNA, 36 bp, synthetic construct; identical to SEQ ID NO: 14815
  misc_feature 1..36: note = Synthetic oligonucleotide
  source 1..36: mol_type = other DNA

SEQ ID NO: 30789 - DNA, 36 bp, synthetic construct; identical to SEQ ID NO: 14815
  misc_feature 1..36: note = Synthetic oligonucleotide
  source 1..36: mol_type = other DNA

SEQ ID NO: 30790 - DNA, 36 bp, synthetic construct; identical to SEQ ID NO: 14815
  misc_feature 1..36: note = Synthetic oligonucleotide
  source 1..36: mol_type = other DNA

SEQ ID NO: 30791 - DNA, 36 bp, synthetic construct; identical to SEQ ID NO: 14816
  misc_feature 1..36: note = Synthetic oligonucleotide
  source 1..36: mol_type = other DNA

SEQ ID NO: 30792 - DNA, 36 bp, synthetic construct
  misc_feature 1..36: note = Synthetic oligonucleotide
  source 1..36: mol_type = other DNA
gttttggcgcagtgtcaatctgactggtaatcaaac

SEQ ID NO: 30793 - DNA, 36 bp, synthetic construct; identical to SEQ ID NO: 30792
  misc_feature 1..36: note = Synthetic oligonucleotide
  source 1..36: mol_type = other DNA

SEQ ID NO: 30794 - DNA, 36 bp, synthetic construct
  misc_feature 1..36: note = Synthetic oligonucleotide
  source 1..36: mol_type = other DNA
gttttggctctctaatgaatattgataaacttatac

SEQ ID NO: 30795 - DNA, 36 bp, synthetic construct; identical to SEQ ID NO: 30794
  misc_feature 1..36: note = Synthetic oligonucleotide
  source 1..36: mol_type = other DNA

SEQ ID NO: 30796 - DNA, 36 bp, synthetic construct; identical to SEQ ID NO: 30794
  misc_feature 1..36: note = Synthetic oligonucleotide
  source 1..36: mol_type = other DNA

SEQ ID NO: 30797 - DNA, 36 bp, synthetic construct; identical to SEQ ID NO: 30794
  misc_feature 1..36: note = Synthetic oligonucleotide
  source 1..36: mol_type = other DNA

SEQ ID NO: 30798 - DNA, 36 bp, synthetic construct; identical to SEQ ID NO: 30794
  misc_feature 1..36: note = Synthetic oligonucleotide
  source 1..36: mol_type = other DNA

SEQ ID NO: 30799 - DNA, 36 bp, synthetic construct; identical to SEQ ID NO: 30794
  misc_feature 1..36: note = Synthetic oligonucleotide
  source 1..36: mol_type = other DNA

SEQ ID NO: 30800 - DNA, 36 bp, synthetic construct
  misc_feature 1..36: note = Synthetic oligonucleotide
  source 1..36: mol_type = other DNA
gttttggctctctgatgaatattgataaacttatac

SEQ ID NO: 30801 - DNA, 36 bp, synthetic construct; identical to SEQ ID NO: 30800
  misc_feature 1..36: note = Synthetic oligonucleotide
  source 1..36: mol_type = other DNA

SEQ ID NO: 30802 - DNA, 36 bp, synthetic construct; identical to SEQ ID NO: 30800
  misc_feature 1..36: note = Synthetic oligonucleotide
  source 1..36: mol_type = other DNA

SEQ ID NO: 30803 - DNA, 36 bp, synthetic construct; identical to SEQ ID NO: 30800
  misc_feature 1..36: note = Synthetic oligonucleotide
  source 1..36: mol_type = other DNA

SEQ ID NO: 30804 - DNA, 36 bp, synthetic construct; identical to SEQ ID NO: 30800
  misc_feature 1..36: note = Synthetic oligonucleotide
  source 1..36: mol_type = other DNA

SEQ ID NO: 30805 - DNA, 36 bp, synthetic construct; identical to SEQ ID NO: 30800
  misc_feature 1..36: note = Synthetic oligonucleotide
  source 1..36: mol_type = other DNA

SEQ ID NO: 30806 - DNA, 36 bp, synthetic construct; identical to SEQ ID NO: 30800
  misc_feature 1..36: note = Synthetic oligonucleotide
  source 1..36: mol_type = other DNA

SEQ ID NO: 30807 - DNA, 36 bp, synthetic construct; identical to SEQ ID NO: 30800
  misc_feature 1..36: note = Synthetic oligonucleotide
  source 1..36: mol_type = other DNA

SEQ ID NO: 30808 - DNA, 36 bp, synthetic construct; identical to SEQ ID NO: 30800
  misc_feature 1..36: note = Synthetic oligonucleotide
  source 1..36: mol_type = other DNA

SEQ ID NO: 30809 - DNA, 36 bp, synthetic construct; identical to SEQ ID NO: 30800
  misc_feature 1..36: note = Synthetic oligonucleotide
  source 1..36: mol_type = other DNA

SEQ ID NO: 30810 - DNA, 36 bp, synthetic construct; identical to SEQ ID NO: 30800
  misc_feature 1..36: note = Synthetic oligonucleotide
  source 1..36: mol_type = other DNA

SEQ ID NO: 30811 - DNA, 36 bp, synthetic construct; identical to SEQ ID NO: 30800
  misc_feature 1..36: note = Synthetic oligonucleotide
  source 1..36: mol_type = other DNA

SEQ ID NO: 30812 - DNA, 36 bp, synthetic construct; identical to SEQ ID NO: 30800
  misc_feature 1..36: note = Synthetic oligonucleotide
  source 1..36: mol_type = other DNA

SEQ ID NO: 30813 - DNA, 36 bp, synthetic construct; identical to SEQ ID NO: 30800
  misc_feature 1..36: note = Synthetic oligonucleotide
  source 1..36: mol_type = other DNA

SEQ ID NO: 30814 - DNA, 36 bp, synthetic construct; identical to SEQ ID NO: 30800
  misc_feature 1..36: note = Synthetic oligonucleotide
  source 1..36: mol_type = other DNA

SEQ ID NO: 30815 - DNA, 36 bp, synthetic construct; identical to SEQ ID NO: 30800
  misc_feature 1..36: note = Synthetic oligonucleotide
  source 1..36: mol_type = other DNA

SEQ ID NO: 30816 - DNA, 36 bp, synthetic construct; identical to SEQ ID NO: 30800
  misc_feature 1..36: note = Synthetic oligonucleotide
  source 1..36: mol_type = other DNA

SEQ ID NO: 30817 - DNA, 36 bp, synthetic construct; identical to SEQ ID NO: 30800
  misc_feature 1..36: note = Synthetic oligonucleotide
  source 1..36: mol_type = other DNA

SEQ ID NO: 30818 - DNA, 36 bp, synthetic construct; identical to SEQ ID NO: 30800
  misc_feature 1..36: note = Synthetic oligonucleotide
  source 1..36: mol_type = other DNA

SEQ ID NO: 30819 - DNA, 36 bp, synthetic construct; identical to SEQ ID NO: 30800
  misc_feature 1..36: note = Synthetic oligonucleotide
  source 1..36: mol_type = other DNA

SEQ ID NO: 30820 - DNA, 36 bp, synthetic construct; identical to SEQ ID NO: 30800
  misc_feature 1..36: note = Synthetic oligonucleotide
  source 1..36: mol_type = other DNA

SEQ ID NO: 30821 - DNA, 36 bp, synthetic construct; identical to SEQ ID NO: 30800
  misc_feature 1..36: note = Synthetic oligonucleotide
  source 1..36: mol_type = other DNA

SEQ ID NO: 30822 - DNA, 37 bp, synthetic construct
  misc_feature 1..37: note = Synthetic oligonucleotide
  source 1..37: mol_type = other DNA
gttttggctctctgatgaatattgataaacttatatt

SEQ ID NO: 30823 - DNA, 36 bp, synthetic construct
  misc_feature 1..36: note = Synthetic oligonucleotide
  source 1..36: mol_type = other DNA
gttttggcttccccccggaggcgcgcctgatagaat

SEQ ID NO: 30824 - DNA, 36 bp, synthetic construct
  misc_feature 1..36: note = Synthetic oligonucleotide
  source 1..36: mol_type = other DNA
gttttggcttccccccggaggcgcgggtgataaaat

SEQ ID NO: 30825 - DNA, 38 bp, synthetic construct
  misc_feature 1..38: note = Synthetic oligonucleotide
  source 1..38: mol_type = other DNA
gttttggcttgcctacggacttcaagtaatcacatata

SEQ ID NO: 30826 - DNA, 36 bp, synthetic construct; identical to SEQ ID NO: 14819
  misc_feature 1..36: note = Synthetic oligonucleotide
  source 1..36: mol_type = other DNA

SEQ ID NO: 30827 - DNA, 36 bp, synthetic construct; identical to SEQ ID NO: 14819
  misc_feature 1..36: note = Synthetic oligonucleotide
  source 1..36: mol_type = other DNA

SEQ ID NO: 30828 - DNA, 36 bp, synthetic construct; identical to SEQ ID NO: 14819
  misc_feature 1..36: note = Synthetic oligonucleotide
  source 1..36: mol_type = other DNA

SEQ ID NO: 30829 - DNA, 36 bp, synthetic construct; identical to SEQ ID NO: 14819
  misc_feature 1..36: note = Synthetic oligonucleotide
  source 1..36: mol_type = other DNA

SEQ ID NO: 30830 - DNA, 36 bp, synthetic construct; identical to SEQ ID NO: 14819
  misc_feature 1..36: note = Synthetic oligonucleotide
  source 1..36: mol_type = other DNA

SEQ ID NO: 30831 - DNA, 36 bp, synthetic construct; identical to SEQ ID NO: 14819
  misc_feature 1..36: note = Synthetic oligonucleotide
  source 1..36: mol_type = other DNA

SEQ ID NO: 30832 - DNA, 36 bp, synthetic construct; identical to SEQ ID NO: 14819
  misc_feature 1..36: note = Synthetic oligonucleotide
  source 1..36: mol_type = other DNA

SEQ ID NO: 30833 - DNA, 36 bp, synthetic construct; identical to SEQ ID NO: 14820
  misc_feature 1..36: note = Synthetic oligonucleotide
  source 1..36: mol_type = other DNA

SEQ ID NO: 30834 - DNA, 36 bp, synthetic construct; identical to SEQ ID NO: 14820
  misc_feature 1..36: note = Synthetic oligonucleotide
  source 1..36: mol_type = other DNA

SEQ ID NO: 30835 - DNA, 36 bp, synthetic construct; identical to SEQ ID NO: 14820
  misc_feature 1..36: note = Synthetic oligonucleotide
  source 1..36: mol_type = other DNA

SEQ ID NO: 30836 - DNA, 36 bp, synthetic construct; identical to SEQ ID NO: 14821
  misc_feature 1..36: note = Synthetic oligonucleotide
  source 1..36: mol_type = other DNA

SEQ ID NO: 30837 - DNA, 36 bp, synthetic construct
  misc_feature 1..36: note = Synthetic oligonucleotide
  source 1..36: mol_type = other DNA
gttttggtaccattctaaacaacatgactctaaaac

SEQ ID NO: 30838 - DNA, 36 bp, synthetic construct; identical to SEQ ID NO: 30837
  misc_feature 1..36: note = Synthetic oligonucleotide
  source 1..36: mol_type = other DNA

SEQ ID NO: 30839 - DNA, 36 bp, synthetic construct; identical to SEQ ID NO: 30837
  misc_feature 1..36: note = Synthetic oligonucleotide
  source 1..36: mol_type = other DNA

SEQ ID NO: 30840 - DNA, 36 bp, synthetic construct; identical to SEQ ID NO: 30837
  misc_feature 1..36: note = Synthetic oligonucleotide
  source 1..36: mol_type = other DNA

SEQ ID NO: 30841 - DNA, 36 bp, synthetic construct; identical to SEQ ID NO: 30837
  misc_feature 1..36: note = Synthetic oligonucleotide
  source 1..36: mol_type = other DNA

SEQ ID NO: 30842 - DNA, 36 bp, synthetic construct; identical to SEQ ID NO: 14823
  misc_feature 1..36: note = Synthetic oligonucleotide
  source 1..36: mol_type = other DNA

SEQ ID NO: 30843 - DNA, 36 bp, synthetic construct
  misc_feature 1..36: note = Synthetic oligonucleotide
  source 1..36: mol_type = other DNA
gttttggtaccctcagaaaatcagttaaactaatac

SEQ ID NO: 30844 - DNA, 36 bp, synthetic construct; identical to SEQ ID NO: 30843
  misc_feature 1..36: note = Synthetic oligonucleotide
  source 1..36: mol_type = other DNA

SEQ ID NO: 30845 - DNA, 36 bp, synthetic construct; identical to SEQ ID NO: 14827
  misc_feature 1..36: note = Synthetic oligonucleotide
  source 1..36: mol_type = other DNA

SEQ ID NO: 30846 - DNA, 36 bp, synthetic construct; identical to SEQ ID NO: 14827
  misc_feature 1..36: note = Synthetic oligonucleotide
  source 1..36: mol_type = other DNA

SEQ ID NO: 30847 - DNA, 36 bp, synthetic construct; identical to SEQ ID NO: 14827
  misc_feature 1..36: note = Synthetic oligonucleotide
  source 1..36: mol_type = other DNA

SEQ ID NO: 30848 - DNA, 36 bp, synthetic construct; identical to SEQ ID NO: 14828
  misc_feature 1..36: note = Synthetic oligonucleotide
  source 1..36: mol_type = other DNA

SEQ ID NO: 30849 - DNA, 36 bp, synthetic construct; identical to SEQ ID NO: 14831
  misc_feature 1..36: note = Synthetic oligonucleotide
  source 1..36: mol_type = other DNA

SEQ ID NO: 30850 - DNA, 36 bp, synthetic construct
  misc_feature 1..36: note = Synthetic oligonucleotide
  source 1..36: mol_type = other DNA
gttttggtatcattctaaacaacatgactctaaaac

SEQ ID NO: 30851 - DNA, 36 bp, synthetic construct
  misc_feature 1..36: note = Synthetic oligonucleotide
  source 1..36: mol_type = other DNA
gttttggtgtagtgacattctgactggtaactaaac

SEQ ID NO: 30852 - DNA, 36 bp, synthetic construct
  misc_feature 1..36: note = Synthetic oligonucleotide
  source 1..36: mol_type = other DNA
gttttggtgtagtgacgtcctgactggtaattaaac

SEQ ID NO: 30853 - DNA, 36 bp, synthetic construct
  misc_feature 1..36: note = Synthetic oligonucleotide
  source 1..36: mol_type = other DNA
gttttggttctctgatggatattgataaactgatac

SEQ ID NO: 30854 - DNA, 36 bp, synthetic construct
  misc_feature 1..36: note = Synthetic oligonucleotide
  source 1..36: mol_type = other DNA
gttttggttctctgatggatattgataaacttacac

SEQ ID NO: 30855 - DNA, 36 bp, synthetic construct
  misc_feature 1..36: note = Synthetic oligonucleotide
  source 1..36: mol_type = other DNA
gttttggttctctgatggatattgatagacttatac

SEQ ID NO: 30856 - DNA, 36 bp, synthetic construct; identical to SEQ ID NO: 14838
  misc_feature 1..36: note = Synthetic oligonucleotide
  source 1..36: mol_type = other DNA

SEQ ID NO: 30857 - DNA, 36 bp, synthetic construct; identical to SEQ ID NO: 14838
  misc_feature 1..36: note = Synthetic oligonucleotide
  source 1..36: mol_type = other DNA

SEQ ID NO: 30858 - DNA, 36 bp, synthetic construct; identical to SEQ ID NO: 14838
  misc_feature 1..36: note = Synthetic oligonucleotide
  source 1..36: mol_type = other DNA

SEQ ID NO: 30859 - DNA, 36 bp, synthetic construct
  misc_feature 1..36: note = Synthetic oligonucleotide
  source 1..36: mol_type = other DNA
gttttgtaacttattgatttaacaaagctctcaaac

SEQ ID NO: 30860 - DNA, 36 bp, synthetic construct
  misc_feature 1..36: note = Synthetic oligonucleotide
  source 1..36: mol_type = other DNA
gttttgtaatcattcaaaataacacaactataaaac

SEQ ID NO: 30861 - DNA, 36 bp, synthetic construct; identical to SEQ ID NO: 30860
  misc_feature 1..36: note = Synthetic oligonucleotide
  source 1..36: mol_type = other DNA

SEQ ID NO: 30862 - DNA, 36 bp, synthetic construct
  misc_feature 1..36: note = Synthetic oligonucleotide
  source 1..36: mol_type = other DNA
gttttgtaatcattcaaaataacacacttctaaaac

SEQ ID NO: 30863 - DNA, 36 bp, synthetic construct; identical to SEQ ID NO: 30862
  misc_feature 1..36: note = Synthetic oligonucleotide
  source 1..36: mol_type = other DNA

SEQ ID NO: 30864 - DNA, 36 bp, synthetic construct; identical to SEQ ID NO: 14842
  misc_feature 1..36: note = Synthetic oligonucleotide
  source 1..36: mol_type = other DNA

SEQ ID NO: 30865 - DNA, 36 bp, synthetic construct; identical to SEQ ID NO: 14842
  misc_feature 1..36: note = Synthetic oligonucleotide
  source 1..36: mol_type = other DNA

SEQ ID NO: 30866 - DNA, 36 bp, synthetic construct; identical to SEQ ID NO: 14842
  misc_feature 1..36: note = Synthetic oligonucleotide
  source 1..36: mol_type = other DNA

SEQ ID NO: 30867 - DNA, 36 bp, synthetic construct; identical to SEQ ID NO: 14842
  misc_feature 1..36: note = Synthetic oligonucleotide
  source 1..36: mol_type = other DNA

SEQ ID NO: 30868 - DNA, 36 bp, synthetic construct; identical to SEQ ID NO: 14842
  misc_feature 1..36: note = Synthetic oligonucleotide
  source 1..36: mol_type = other DNA

SEQ ID NO: 30869 - DNA, 36 bp, synthetic construct; identical to SEQ ID NO: 14842
  misc_feature 1..36: note = Synthetic oligonucleotide
  source 1..36: mol_type = other DNA

SEQ ID NO: 30870 - DNA, 36 bp, synthetic construct; identical to SEQ ID NO: 14842
  misc_feature 1..36: note = Synthetic oligonucleotide
  source 1..36: mol_type = other DNA

SEQ ID NO: 30871 - DNA, 36 bp, synthetic construct; identical to SEQ ID NO: 14842
  misc_feature 1..36: note = Synthetic oligonucleotide
  source 1..36: mol_type = other DNA

SEQ ID NO: 30872 - DNA, 36 bp, synthetic construct; identical to SEQ ID NO: 14842
  misc_feature 1..36: note = Synthetic oligonucleotide
  source 1..36: mol_type = other DNA

SEQ ID NO: 30873 - DNA, 36 bp, synthetic construct; identical to SEQ ID NO: 14842
  misc_feature 1..36: note = Synthetic oligonucleotide
  source 1..36: mol_type = other DNA

SEQ ID NO: 30874 - DNA, 36 bp, synthetic construct
  misc_feature 1..36: note = Synthetic oligonucleotide
  source 1..36: mol_type = other DNA
gttttgtagaaatcaaaatttacatatctctcaaac

SEQ ID NO: 30875 - DNA, 36 bp, synthetic construct
  misc_feature 1..36: note = Synthetic oligonucleotide
  source 1..36: mol_type = other DNA
gttttgtagaaatcaaaatttgcatatctctcaaac

SEQ ID NO: 30876 - DNA, 36 bp, synthetic construct; identical to SEQ ID NO: 14843
  misc_feature 1..36: note = Synthetic oligonucleotide
  source 1..36: mol_type = other DNA

SEQ ID NO: 30877 - DNA, 36 bp, synthetic construct; identical to SEQ ID NO: 14843
  misc_feature 1..36: note = Synthetic oligonucleotide
  source 1..36: mol_type = other DNA

SEQ ID NO: 30878 - DNA, 36 bp, synthetic construct; identical to SEQ ID NO: 14843
  misc_feature 1..36: note = Synthetic oligonucleotide
  source 1..36: mol_type = other DNA

SEQ ID NO: 30879 - DNA, 36 bp, synthetic construct; identical to SEQ ID NO: 14843
  misc_feature 1..36: note = Synthetic oligonucleotide
  source 1..36: mol_type = other DNA

SEQ ID NO: 30880 - DNA, 36 bp, synthetic construct; identical to SEQ ID NO: 14843
  misc_feature 1..36: note = Synthetic oligonucleotide
  source 1..36: mol_type = other DNA

SEQ ID NO: 30881 - DNA, 36 bp, synthetic construct
  misc_feature 1..36: note = Synthetic oligonucleotide
  source 1..36: mol_type = other DNA
gttttgtatctgttcaaaataacacaactctaaaac

SEQ ID NO: 30882 - DNA, 36 bp, synthetic construct
  misc_feature 1..36: note = Synthetic oligonucleotide
  source 1..36: mol_type = other DNA
gttttgtatctttctaaattagcaaagctctcaaac

SEQ ID NO: 30883 - DNA, 36 bp, synthetic construct
  misc_feature 1..36: note = Synthetic oligonucleotide
  source 1..36: mol_type = other DNA
gttttgtatctttctgaattagcaaagctctcaaac

SEQ ID NO: 30884 - DNA, 36 bp, synthetic construct
  misc_feature 1..36: note = Synthetic oligonucleotide
  source 1..36: mol_type = other DNA
gttttgtatctttttgaattagcaaagctctcaaac

SEQ ID NO: 30885 - DNA, 36 bp, synthetic construct; identical to SEQ ID NO: 30884
  misc_feature 1..36: note = Synthetic oligonucleotide
  source 1..36: mol_type = other DNA

SEQ ID NO: 30886 - DNA, 36 bp, synthetic construct; identical to SEQ ID NO: 30884
  misc_feature 1..36: note = Synthetic oligonucleotide
  source 1..36: mol_type = other DNA

SEQ ID NO: 30887 - DNA, 36 bp, synthetic construct; identical to SEQ ID NO: 30884
  misc_feature 1..36: note = Synthetic oligonucleotide
  source 1..36: mol_type = other DNA

SEQ ID NO: 30888 - DNA, 36 bp, synthetic construct; identical to SEQ ID NO: 30884
  misc_feature 1..36: note = Synthetic oligonucleotide
  source 1..36: mol_type = other DNA

SEQ ID NO: 30889 - DNA, 36 bp, synthetic construct; identical to SEQ ID NO: 30884
  misc_feature 1..36: note = Synthetic oligonucleotide
  source 1..36: mol_type = other DNA

SEQ ID NO: 30890 - DNA, 36 bp, synthetic construct; identical to SEQ ID NO: 30884
  misc_feature 1..36: note = Synthetic oligonucleotide
  source 1..36: mol_type = other DNA

SEQ ID NO: 30891 - DNA, 36 bp, synthetic construct; identical to SEQ ID NO: 30884
  misc_feature 1..36: note = Synthetic oligonucleotide
  source 1..36: mol_type = other DNA

SEQ ID NO: 30892 - DNA, 36 bp, synthetic construct; identical to SEQ ID NO: 30884
  misc_feature 1..36: note = Synthetic oligonucleotide
  source 1..36: mol_type = other DNA

SEQ ID NO: 30893 - DNA, 36 bp, synthetic construct; identical to SEQ ID NO: 30884
  misc_feature 1..36: note = Synthetic oligonucleotide
  source 1..36: mol_type = other DNA

SEQ ID NO: 30894 - DNA, 36 bp, synthetic construct
  misc_feature 1..36: note = Synthetic oligonucleotide
  source 1..36: mol_type = other DNA
gttttgtatctttttgaatttgcaaagctctcaaac

SEQ ID NO: 30895 - DNA, 36 bp, synthetic construct; identical to SEQ ID NO: 30894
  misc_feature 1..36: note = Synthetic oligonucleotide
  source 1..36: mol_type = other DNA

SEQ ID NO: 30896 - DNA, 36 bp, synthetic construct; identical to SEQ ID NO: 30894
  misc_feature 1..36: note = Synthetic oligonucleotide
  source 1..36: mol_type = other DNA

SEQ ID NO: 30897 - DNA, 36 bp, synthetic construct; identical to SEQ ID NO: 30894
  misc_feature 1..36: note = Synthetic oligonucleotide
  source 1..36: mol_type = other DNA

SEQ ID NO: 30898 - DNA, 36 bp, synthetic construct
  misc_feature 1..36: note = Synthetic oligonucleotide
  source 1..36: mol_type = other DNA
gttttgttaccatatgattttttgctagaataagac

SEQ ID NO: 30899 - DNA, 36 bp, synthetic construct; identical to SEQ ID NO: 30898
  misc_feature 1..36: note = Synthetic oligonucleotide
  source 1..36: mol_type = other DNA

SEQ ID NO: 30900 - DNA, 36 bp, synthetic construct; identical to SEQ ID NO: 30898
  misc_feature 1..36: note = Synthetic oligonucleotide
  source 1..36: mol_type = other DNA

SEQ ID NO: 30901 - DNA, 36 bp, synthetic construct; identical to SEQ ID NO: 30898
  misc_feature 1..36: note = Synthetic oligonucleotide
  source 1..36: mol_type = other DNA

SEQ ID NO: 30902 - DNA, 36 bp, synthetic construct; identical to SEQ ID NO: 30898
  misc_feature 1..36: note = Synthetic oligonucleotide
  source 1..36: mol_type = other DNA

SEQ ID NO: 30903 - DNA, 36 bp, synthetic construct; identical to SEQ ID NO: 30898
  misc_feature 1..36: note = Synthetic oligonucleotide
  source 1..36: mol_type = other DNA

SEQ ID NO: 30904 - DNA, 36 bp, synthetic construct
  misc_feature 1..36: note = Synthetic oligonucleotide
  source 1..36: mol_type = other DNA
gttttgttaccatatggatttttgctagaacacaac

SEQ ID NO: 30905 - DNA, 36 bp, synthetic construct; identical to SEQ ID NO: 30904
  misc_feature 1..36: note = Synthetic oligonucleotide
  source 1..36: mol_type = other DNA

SEQ ID NO: 30906 - DNA, 36 bp, synthetic construct
  misc_feature 1..36: note = Synthetic oligonucleotide
  source 1..36: mol_type = other DNA
gttttgttaccatatggttttttgctagaatataac

SEQ ID NO: 30907 - DNA, 24 bp, synthetic construct
  misc_feature 1..24: note = Synthetic oligonucleotide
  source 1..24: mol_type = other DNA
gttttgttaccattcaaaataaca

SEQ ID NO: 30908 - DNA, 28 bp, synthetic construct
  misc_feature 1..28: note = Synthetic oligonucleotide
  source 1..28: mol_type = other DNA
gttttgttaccattcaaaataacatact

SEQ ID NO: 30909 - DNA, 28 bp, synthetic construct
  misc_feature 1..28: note = Synthetic oligonucleotide
  source 1..28: mol_type = other DNA
gttttgttaccattcaaaataacatact

SEQ ID NO: 30910 - DNA, 36 bp, synthetic construct; identical to SEQ ID NO: 14852
  misc_feature 1..36: note = Synthetic oligonucleotide
  source 1..36: mol_type = other DNA

SEQ ID NO: 30911 - DNA, 36 bp, synthetic construct; identical to SEQ ID NO: 14852
  misc_feature 1..36: note = Synthetic oligonucleotide
  source 1..36: mol_type = other DNA

SEQ ID NO: 30912 - DNA, 36 bp, synthetic construct; identical to SEQ ID NO: 14852
  misc_feature 1..36: note = Synthetic oligonucleotide
  source 1..36: mol_type = other DNA

SEQ ID NO: 30913 - DNA, 36 bp, synthetic construct; identical to SEQ ID NO: 14852
  misc_feature 1..36: note = Synthetic oligonucleotide
  source 1..36: mol_type = other DNA

SEQ ID NO: 30914 - DNA, 36 bp, synthetic construct; identical to SEQ ID NO: 14852
  misc_feature 1..36: note = Synthetic oligonucleotide
  source 1..36: mol_type = other DNA

SEQ ID NO: 30915 - DNA, 36 bp, synthetic construct; identical to SEQ ID NO: 14852
  misc_feature 1..36: note = Synthetic oligonucleotide
  source 1..36: mol_type = other DNA

SEQ ID NO: 30916 - DNA, 36 bp, synthetic construct; identical to SEQ ID NO: 14852
  misc_feature 1..36: note = Synthetic oligonucleotide
  source 1..36: mol_type = other DNA

SEQ ID NO: 30917 - DNA, 36 bp, synthetic construct; identical to SEQ ID NO: 14852
  misc_feature 1..36: note = Synthetic oligonucleotide
  source 1..36: mol_type = other DNA

SEQ ID NO: 30918 - DNA, 36 bp, synthetic construct; identical to SEQ ID NO: 14852
  misc_feature 1..36: note = Synthetic oligonucleotide
  source 1..36: mol_type = other DNA

SEQ ID NO: 30919 - DNA, 36 bp, synthetic construct; identical to SEQ ID NO: 14852
  misc_feature 1..36: note = Synthetic oligonucleotide
  source 1..36: mol_type = other DNA

SEQ ID NO: 30920 - DNA, 36 bp, synthetic construct; identical to SEQ ID NO: 14852
  misc_feature 1..36: note = Synthetic oligonucleotide
  source 1..36: mol_type = other DNA

SEQ ID NO: 30921 - DNA, 36 bp, synthetic construct; identical to SEQ ID NO: 14852
  misc_feature 1..36: note = Synthetic oligonucleotide
  source 1..36: mol_type = other DNA

SEQ ID NO: 30922 - DNA, 36 bp, synthetic construct; identical to SEQ ID NO: 14852
  misc_feature 1..36: note = Synthetic oligonucleotide
  source 1..36: mol_type = other DNA

SEQ ID NO: 30923 - DNA, 36 bp, synthetic construct; identical to SEQ ID NO: 14852
  misc_feature 1..36: note = Synthetic oligonucleotide
  source 1..36: mol_type = other DNA

SEQ ID NO: 30924 - DNA, 36 bp, synthetic construct; identical to SEQ ID NO: 14852
  misc_feature 1..36: note = Synthetic oligonucleotide
  source 1..36: mol_type = other DNA

SEQ ID NO: 30925 - DNA, 36 bp, synthetic construct; identical to SEQ ID NO: 14852
  misc_feature 1..36: note = Synthetic oligonucleotide
  source 1..36: mol_type = other DNA

SEQ ID NO: 30926 - DNA, 36 bp, synthetic construct; identical to SEQ ID NO: 14852
  misc_feature 1..36: note = Synthetic oligonucleotide
  source 1..36: mol_type = other DNA

SEQ ID NO: 30927 - DNA, 36 bp, synthetic construct; identical to SEQ ID NO: 14852
  misc_feature 1..36: note = Synthetic oligonucleotide
  source 1..36: mol_type = other DNA

SEQ ID NO: 30928 - DNA, 36 bp, synthetic construct; identical to SEQ ID NO: 14852
  misc_feature 1..36: note = Synthetic oligonucleotide
  source 1..36: mol_type = other DNA

SEQ ID NO: 30929 - DNA, 36 bp, synthetic construct; identical to SEQ ID NO: 14852
  misc_feature 1..36: note = Synthetic oligonucleotide
  source 1..36: mol_type = other DNA

SEQ ID NO: 30930 - DNA, 36 bp, synthetic construct; identical to SEQ ID NO: 14852
  misc_feature 1..36: note = Synthetic oligonucleotide
  source 1..36: mol_type = other DNA

SEQ ID NO: 30931 - DNA, 36 bp, synthetic construct; identical to SEQ ID NO: 14852
  misc_feature 1..36: note = Synthetic oligonucleotide
  source 1..36: mol_type = other DNA

SEQ ID NO: 30932 - DNA, 36 bp, synthetic construct; identical to SEQ ID NO: 14852
  misc_feature 1..36: note = Synthetic oligonucleotide
  source 1..36: mol_type = other DNA

SEQ ID NO: 30933 - DNA, 36 bp, synthetic construct; identical to SEQ ID NO: 14852
  misc_feature 1..36: note = Synthetic oligonucleotide
  source 1..36: mol_type = other DNA

SEQ ID NO: 30934 - DNA, 36 bp, synthetic construct; identical to SEQ ID NO: 14852
  misc_feature 1..36: note = Synthetic oligonucleotide
  source 1..36: mol_type = other DNA

SEQ ID NO: 30935 - DNA, 36 bp, synthetic construct; identical to SEQ ID NO: 14852
  misc_feature 1..36: note = Synthetic oligonucleotide
  source 1..36: mol_type = other DNA

SEQ ID NO: 30936 - DNA, 36 bp, synthetic construct; identical to SEQ ID NO: 14852
  misc_feature 1..36: note = Synthetic oligonucleotide
  source 1..36: mol_type = other DNA

SEQ ID NO: 30937 - DNA, 36 bp, synthetic construct; identical to SEQ ID NO: 14852
  misc_feature 1..36: note = Synthetic oligonucleotide
  source 1..36: mol_type = other DNA

SEQ ID NO: 30938 - DNA, 36 bp, synthetic construct; identical to SEQ ID NO: 14852
  misc_feature 1..36: note = Synthetic oligonucleotide
  source 1..36: mol_type = other DNA

SEQ ID NO: 30939 - DNA, 36 bp, synthetic construct
  misc_feature 1..36: note = Synthetic oligonucleotide
  source 1..36: mol_type = other DNA
gttttgttaccattcaaaataacatactcctaaaat

SEQ ID NO: 30940 - DNA, 36 bp, synthetic construct; identical to SEQ ID NO: 30939
  misc_feature 1..36: note = Synthetic oligonucleotide
  source 1..36: mol_type = other DNA

SEQ ID NO: 30941 - DNA, 36 bp, synthetic construct; identical to SEQ ID NO: 30939
  misc_feature 1..36: note = Synthetic oligonucleotide
  source 1..36: mol_type = other DNA

SEQ ID NO: 30942 - DNA, 36 bp, synthetic construct; identical to SEQ ID NO: 30939
  misc_feature 1..36: note = Synthetic oligonucleotide
  source 1..36: mol_type = other DNA

SEQ ID NO: 30943 - DNA, 36 bp, synthetic construct
  misc_feature 1..36: note = Synthetic oligonucleotide
  source 1..36: mol_type = other DNA
gttttgttaccattcaaaataacatacttctaaaac

SEQ ID NO: 30944 - DNA, 36 bp, synthetic construct
  misc_feature 1..36: note = Synthetic oligonucleotide
  source 1..36: mol_type = other DNA
gttttgttaccattcaaaataacattgtcctaaaac

SEQ ID NO: 30945 - DNA, 36 bp, synthetic construct; identical to SEQ ID NO: 14853
  misc_feature 1..36: note = Synthetic oligonucleotide
  source 1..36: mol_type = other DNA

SEQ ID NO: 30946 - DNA, 36 bp, synthetic construct; identical to SEQ ID NO: 14853
  misc_feature 1..36: note = Synthetic oligonucleotide
  source 1..36: mol_type = other DNA

SEQ ID NO: 30947 - DNA, 36 bp, synthetic construct; identical to SEQ ID NO: 14853
  misc_feature 1..36: note = Synthetic oligonucleotide
  source 1..36: mol_type = other DNA

SEQ ID NO: 30948 - DNA, 36 bp, synthetic construct
  misc_feature 1..36: note = Synthetic oligonucleotide
  source 1..36: mol_type = other DNA
gtttttaataagtcagattcttaatcaagctaaaac

SEQ ID NO: 30949 - DNA, 37 bp, synthetic construct
  misc_feature 1..37: note = Synthetic oligonucleotide
  source 1..37: mol_type = other DNA
gtttttatcaataagtcaaagatacattttgaaagca

SEQ ID NO: 30950 - DNA, 36 bp, synthetic construct
  misc_feature 1..36: note = Synthetic oligonucleotide
  source 1..36: mol_type = other DNA
gtttttatctcgccctcccaagggcactgtggtatc

SEQ ID NO: 30951 - DNA, 36 bp, synthetic construct; identical to SEQ ID NO: 30950
  misc_feature 1..36: note = Synthetic oligonucleotide
  source 1..36: mol_type = other DNA

SEQ ID NO: 30952 - DNA, 36 bp, synthetic construct
  misc_feature 1..36: note = Synthetic oligonucleotide
  source 1..36: mol_type = other DNA
gtttttattccccgtgattctccgctatgctataat

SEQ ID NO: 30953 - DNA, 36 bp, synthetic construct
  misc_feature 1..36: note = Synthetic oligonucleotide
  source 1..36: mol_type = other DNA
gtttttcaacttactgatttaacaaccttctaaaac

SEQ ID NO: 30954 - DNA, 36 bp, synthetic construct; identical to SEQ ID NO: 30953
  misc_feature 1..36: note = Synthetic oligonucleotide
  source 1..36: mol_type = other DNA

SEQ ID NO: 30955 - DNA, 36 bp, synthetic construct; identical to SEQ ID NO: 30953
  misc_feature 1..36: note = Synthetic oligonucleotide
  source 1..36: mol_type = other DNA

SEQ ID NO: 30956 - DNA, 36 bp, synthetic construct
  misc_feature 1..36: note = Synthetic oligonucleotide
  source 1..36: mol_type = other DNA
gtttttctacattcttgatttacaaggttctcaaac

SEQ ID NO: 30957 - DNA, 36 bp, synthetic construct; identical to SEQ ID NO: 30956
  misc_feature 1..36: note = Synthetic oligonucleotide
  source 1..36: mol_type = other DNA

SEQ ID NO: 30958 - DNA, 36 bp, synthetic construct
  misc_feature 1..36: note = Synthetic oligonucleotide
  source 1..36: mol_type = other DNA
gtttttctaccatataaatttacactactctcaaac

SEQ ID NO: 30959 - DNA, 36 bp, synthetic construct; identical to SEQ ID NO: 30958
  misc_feature 1..36: note = Synthetic oligonucleotide
  source 1..36: mol_type = other DNA

SEQ ID NO: 30960 - DNA, 36 bp, synthetic construct; identical to SEQ ID NO: 14857
  misc_feature 1..36: note = Synthetic oligonucleotide
  source 1..36: mol_type = other DNA

SEQ ID NO: 30961 - DNA, 36 bp, synthetic construct; identical to SEQ ID NO: 14857
  misc_feature 1..36: note = Synthetic oligonucleotide
  source 1..36: mol_type = other DNA

SEQ ID NO: 30962 - DNA, 35 bp, synthetic construct
  misc_feature 1..35: note = Synthetic oligonucleotide
  source 1..35: mol_type = other DNA
gtttttgtacccttgaagaattagtaatgataaaa

SEQ ID NO: 30963 - DNA, 36 bp, synthetic construct; identical to SEQ ID NO: 14860
  misc_feature 1..36: note = Synthetic oligonucleotide
  source 1..36: mol_type = other DNA

SEQ ID NO: 30964 - DNA, 36 bp, synthetic construct; identical to SEQ ID NO: 14860
  misc_feature 1..36: note = Synthetic oligonucleotide
  source 1..36: mol_type = other DNA

SEQ ID NO: 30965 - DNA, 36 bp, synthetic construct; identical to SEQ ID NO: 14860
  misc_feature 1..36: note = Synthetic oligonucleotide
  source 1..36: mol_type = other DNA

SEQ ID NO: 30966 - DNA, 36 bp, synthetic construct; identical to SEQ ID NO: 14860
  misc_feature 1..36: note = Synthetic oligonucleotide
  source 1..36: mol_type = other DNA

SEQ ID NO: 30967 - DNA, 36 bp, synthetic construct; identical to SEQ ID NO: 14861
  misc_feature 1..36: note = Synthetic oligonucleotide
  source 1..36: mol_type = other DNA

SEQ ID NO: 30968 - DNA, 36 bp, synthetic construct; identical to SEQ ID NO: 14861
  misc_feature 1..36: note = Synthetic oligonucleotide
  source 1..36: mol_type = other DNA

SEQ ID NO: 30969 - DNA, 36 bp, synthetic construct; identical to SEQ ID NO: 14863
  misc_feature 1..36: note = Synthetic oligonucleotide
  source 1..36: mol_type = other DNA

SEQ ID NO: 30970 - DNA, 36 bp, synthetic construct; identical to SEQ ID NO: 14863
  misc_feature 1..36: note = Synthetic oligonucleotide
  source 1..36: mol_type = other DNA

SEQ ID NO: 30971 - DNA, 36 bp, synthetic construct; identical to SEQ ID NO: 14863
  misc_feature 1..36: note = Synthetic oligonucleotide
  source 1..36: mol_type = other DNA

SEQ ID NO: 30972 - DNA, 36 bp, synthetic construct; identical to SEQ ID NO: 14863
  misc_feature 1..36: note = Synthetic oligonucleotide
  source 1..36: mol_type = other DNA

SEQ ID NO: 30973 - DNA, 36 bp, synthetic construct; identical to SEQ ID NO: 14863
  misc_feature 1..36: note = Synthetic oligonucleotide
  source 1..36: mol_type = other DNA

SEQ ID NO: 30974 - DNA, 36 bp, synthetic construct; identical to SEQ ID NO: 14863
  misc_feature 1..36: note = Synthetic oligonucleotide
  source 1..36: mol_type = other DNA

SEQ ID NO: 30975 - DNA, 36 bp, synthetic construct; identical to SEQ ID NO: 14863
  misc_feature 1..36: note = Synthetic oligonucleotide
  source 1..36: mol_type = other DNA

SEQ ID NO: 30976 - DNA, 36 bp, synthetic construct; identical to SEQ ID NO: 14863
  misc_feature 1..36: note = Synthetic oligonucleotide
  source 1..36: mol_type = other DNA

SEQ ID NO: 30977 - DNA, 36 bp, synthetic construct; identical to SEQ ID NO: 14863
  misc_feature 1..36: note = Synthetic oligonucleotide
  source 1..36: mol_type = other DNA

SEQ ID NO: 30978 - DNA, 36 bp, synthetic construct; identical to SEQ ID NO: 14863
  misc_feature 1..36: note = Synthetic oligonucleotide
  source 1..36: mol_type = other DNA

SEQ ID NO: 30979 - DNA, 36 bp, synthetic construct; identical to SEQ ID NO: 14863
  misc_feature 1..36: note = Synthetic oligonucleotide
  source 1..36: mol_type = other DNA

SEQ ID NO: 30980 - DNA, 36 bp, synthetic construct; identical to SEQ ID NO: 14863
  misc_feature 1..36: note = Synthetic oligonucleotide
  source 1..36: mol_type = other DNA

SEQ ID NO: 30981 - DNA, 36 bp, synthetic construct; identical to SEQ ID NO: 14863
  misc_feature 1..36: note = Synthetic oligonucleotide
  source 1..36: mol_type = other DNA

SEQ ID NO: 30982 - DNA, 36 bp, synthetic construct; identical to SEQ ID NO: 14863
  misc_feature 1..36: note = Synthetic oligonucleotide
  source 1..36: mol_type = other DNA

SEQ ID NO: 30983 - DNA, 36 bp, synthetic construct; identical to SEQ ID NO: 14863
  misc_feature 1..36: note = Synthetic oligonucleotide
  source 1..36: mol_type = other DNA

SEQ ID NO: 30984 - DNA, 36 bp, synthetic construct; identical to SEQ ID NO: 14863
  misc_feature 1..36: note = Synthetic oligonucleotide
  source 1..36: mol_type = other DNA

SEQ ID NO: 30985 - DNA, 36 bp, synthetic construct; identical to SEQ ID NO: 14863
  misc_feature 1..36: note = Synthetic oligonucleotide
  source 1..36: mol_type = other DNA

SEQ ID NO: 30986 - DNA, 36 bp, synthetic construct; identical to SEQ ID NO: 14863
  misc_feature 1..36: note = Synthetic oligonucleotide
  source 1..36: mol_type = other DNA

SEQ ID NO: 30987 - DNA, 36 bp, synthetic construct; identical to SEQ ID NO: 14863
  misc_feature 1..36: note = Synthetic oligonucleotide
  source 1..36: mol_type = other DNA

SEQ ID NO: 30988 - DNA, 36 bp, synthetic construct; identical to SEQ ID NO: 14863
  misc_feature 1..36: note = Synthetic oligonucleotide
  source 1..36: mol_type = other DNA

SEQ ID NO: 30989 - DNA, 36 bp, synthetic construct; identical to SEQ ID NO: 14863
  misc_feature 1..36: note = Synthetic oligonucleotide
  source 1..36: mol_type = other DNA

SEQ ID NO: 30990 - DNA, 36 bp, synthetic construct; identical to SEQ ID NO: 14863
  misc_feature 1..36: note = Synthetic oligonucleotide
  source 1..36: mol_type = other DNA

SEQ ID NO: 30991 - DNA, 36 bp, synthetic construct; identical to SEQ ID NO: 14863
  misc_feature 1..36: note = Synthetic oligonucleotide
  source 1..36: mol_type = other DNA

SEQ ID NO: 30992 - DNA, 36 bp, synthetic construct; identical to SEQ ID NO: 14863
  misc_feature 1..36: note = Synthetic oligonucleotide
  source 1..36: mol_type = other DNA

SEQ ID NO: 30993 - DNA, 36 bp, synthetic construct; identical to SEQ ID NO: 14863
  misc_feature 1..36: note = Synthetic oligonucleotide
  source 1..36: mol_type = other DNA

SEQ ID NO: 30994 - DNA, 36 bp, synthetic construct; identical to SEQ ID NO: 14863
  misc_feature 1..36: note = Synthetic oligonucleotide
  source 1..36: mol_type = other DNA

SEQ ID NO: 30995 - DNA, 36 bp, synthetic construct; identical to SEQ ID NO: 14863
  misc_feature 1..36: note = Synthetic oligonucleotide
  source 1..36: mol_type = other DNA

SEQ ID NO: 30996 - DNA, 36 bp, synthetic construct; identical to SEQ ID NO: 14863
  misc_feature 1..36: note = Synthetic oligonucleotide
  source 1..36: mol_type = other DNA

SEQ ID NO: 30997 - DNA, 36 bp, synthetic construct; identical to SEQ ID NO: 14863
  misc_feature 1..36: note = Synthetic oligonucleotide
  source 1..36: mol_type = other DNA

SEQ ID NO: 30998 - DNA, 36 bp, synthetic construct; identical to SEQ ID NO: 14863
  misc_feature 1..36: note = Synthetic oligonucleotide
  source 1..36: mol_type = other DNA

SEQ ID NO: 30999 - DNA, 36 bp, synthetic construct; identical to SEQ ID NO: 14863
  misc_feature 1..36: note = Synthetic oligonucleotide
  source 1..36: mol_type = other DNA

SEQ ID NO: 31000 - DNA, 36 bp, synthetic construct; identical to SEQ ID NO: 14863
  misc_feature 1..36: note = Synthetic oligonucleotide
  source 1..36: mol_type = other DNA

SEQ ID NO: 31001 - DNA, 36 bp, synthetic construct; identical to SEQ ID NO: 14863
  misc_feature 1..36: note = Synthetic oligonucleotide
  source 1..36: mol_type = other DNA

SEQ ID NO: 31002 - DNA, 36 bp, synthetic construct; identical to SEQ ID NO: 14863
  misc_feature 1..36: note = Synthetic oligonucleotide
  source 1..36: mol_type = other DNA

SEQ ID NO: 31003 - DNA, 36 bp, synthetic construct; identical to SEQ ID NO: 14863
  misc_feature 1..36: note = Synthetic oligonucleotide
  source 1..36: mol_type = other DNA

SEQ ID NO: 31004 - DNA, 36 bp, synthetic construct; identical to SEQ ID NO: 14863
  misc_feature 1..36: note = Synthetic oligonucleotide
  source 1..36: mol_type = other DNA

SEQ ID NO: 31005 - DNA, 36 bp, synthetic construct; identical to SEQ ID NO: 14863
  misc_feature 1..36: note = Synthetic oligonucleotide
  source 1..36: mol_type = other DNA

SEQ ID NO: 31006 - DNA, 36 bp, synthetic construct; identical to SEQ ID NO: 14863
  misc_feature 1..36: note = Synthetic oligonucleotide
  source 1..36: mol_type = other DNA

SEQ ID NO: 31007 - DNA, 36 bp, synthetic construct; identical to SEQ ID NO: 14863
  misc_feature 1..36: note = Synthetic oligonucleotide
  source 1..36: mol_type = other DNA

SEQ ID NO: 31008 - DNA, 36 bp, synthetic construct; identical to SEQ ID NO: 14863
  misc_feature 1..36: note = Synthetic oligonucleotide
  source 1..36: mol_type = other DNA

SEQ ID NO: 31009 - DNA, 36 bp, synthetic construct; identical to SEQ ID NO: 14863
  misc_feature 1..36: note = Synthetic oligonucleotide
  source 1..36: mol_type = other DNA

SEQ ID NO: 31010 - DNA, 36 bp, synthetic construct; identical to SEQ ID NO: 14863
  misc_feature 1..36: note = Synthetic oligonucleotide
  source 1..36: mol_type = other DNA

SEQ ID NO: 31011 - DNA, 36 bp, synthetic construct; identical to SEQ ID NO: 14863
  misc_feature 1..36: note = Synthetic oligonucleotide
  source 1..36: mol_type = other DNA

SEQ ID NO: 31012 - DNA, 36 bp, synthetic construct; identical to SEQ ID NO: 14863
  misc_feature 1..36: note = Synthetic oligonucleotide
  source 1..36: mol_type = other DNA

SEQ ID NO: 31013 - DNA, 36 bp, synthetic construct; identical to SEQ ID NO: 14863
  misc_feature 1..36: note = Synthetic oligonucleotide
  source 1..36: mol_type = other DNA

SEQ ID NO: 31014 - DNA, 36 bp, synthetic construct; identical to SEQ ID NO: 14863
  misc_feature 1..36: note = Synthetic oligonucleotide
  source 1..36: mol_type = other DNA

SEQ ID NO: 31015 - DNA, 36 bp, synthetic construct; identical to SEQ ID NO: 14863
  misc_feature 1..36: note = Synthetic oligonucleotide
  source 1..36: mol_type = other DNA

SEQ ID NO: 31016 - DNA, 36 bp, synthetic construct; identical to SEQ ID NO: 14863
  misc_feature 1..36: note = Synthetic oligonucleotide
  source 1..36: mol_type = other DNA

SEQ ID NO: 31017 - DNA, 36 bp, synthetic construct; identical to SEQ ID NO: 14863
  misc_feature 1..36: note = Synthetic oligonucleotide
  source 1..36: mol_type = other DNA

SEQ ID NO: 31018 - DNA, 36 bp, synthetic construct; identical to SEQ ID NO: 14863
  misc_feature 1..36: note = Synthetic oligonucleotide
  source 1..36: mol_type = other DNA

SEQ ID NO: 31019 - DNA, 36 bp, synthetic construct; identical to SEQ ID NO: 14863
  misc_feature 1..36: note = Synthetic oligonucleotide
  source 1..36: mol_type = other DNA

SEQ ID NO: 31020 - DNA, 36 bp, synthetic construct; identical to SEQ ID NO: 14863
  misc_feature 1..36: note = Synthetic oligonucleotide
  source 1..36: mol_type = other DNA

SEQ ID NO: 31021 - DNA, 36 bp, synthetic construct; identical to SEQ ID NO: 14864
  misc_feature 1..36: note = Synthetic oligonucleotide
  source 1..36: mol_type = other DNA

SEQ ID NO: 31022 - DNA, 36 bp, synthetic construct; identical to SEQ ID NO: 14864
  misc_feature 1..36: note = Synthetic oligonucleotide
  source 1..36: mol_type = other DNA

SEQ ID NO: 31023 - DNA, 36 bp, synthetic construct
  misc_feature 1..36: note = Synthetic oligonucleotide
  source 1..36: mol_type = other DNA
gtttttgtactctcaggatttaattaaccgtaaaac

SEQ ID NO: 31024 - DNA, 36 bp, synthetic construct
  misc_feature 1..36: note = Synthetic oligonucleotide
  source 1..36: mol_type = other DNA
gtttttgtactcttaaaaattgagtaacggtaaaac

SEQ ID NO: 31025 - DNA, 36 bp, synthetic construct
  misc_feature 1..36: note = Synthetic oligonucleotide
  source 1..36: mol_type = other DNA
gtttttgtattctcaagatttaagtaactataaaac

SEQ ID NO: 31026 - DNA, 19 bp, synthetic construct
  misc_feature 1..19: note = Synthetic oligonucleotide
  source 1..19: mol_type = other DNA
taaaacatgacatgtctta

SEQ ID NO: 31027 - DNA, 19 bp, synthetic construct
  misc_feature 1..19: note = Synthetic oligonucleotide
  source 1..19: mol_type = other DNA
taaaacatgacatgtctta

SEQ ID NO: 31028 - DNA, 19 bp, synthetic construct
  misc_feature 1..19: note = Synthetic oligonucleotide
  source 1..19: mol_type = other DNA
taaaacatgacatgtctta

SEQ ID NO: 31029 - DNA, 19 bp, synthetic construct
  misc_feature 1..19: note = Synthetic oligonucleotide
  source 1..19: mol_type = other DNA
taaaacatgacatgtctta

SEQ ID NO: 31030 - DNA, 20 bp, synthetic construct
  misc_feature 1..20: note = Synthetic oligonucleotide
  source 1..20: mol_type = other DNA
taaatattacctaaaaatta

SEQ ID NO: 31031 - DNA, 36 bp, synthetic construct
  misc_feature 1..36: note = Synthetic oligonucleotide
  source 1..36: mol_type = other DNA
taaattctaccttattcttcggtgcctaataggaac

SEQ ID NO: 31032 - DNA, 22 bp, synthetic construct
  misc_feature 1..22: note = Synthetic oligonucleotide
  source 1..22: mol_type = other DNA
taacgatccccaatagtgtgac

SEQ ID NO: 31033 - DNA, 19 bp, synthetic construct
  misc_feature 1..19: note = Synthetic oligonucleotide
  source 1..19: mol_type = other DNA
taagacatgtcatgtttta

SEQ ID NO: 31034 - DNA, 19 bp, synthetic construct
  misc_feature 1..19: note = Synthetic oligonucleotide
  source 1..19: mol_type = other DNA
taagacatgtcatgtttta

SEQ ID NO: 31035 - DNA, 19 bp, synthetic construct
  misc_feature 1..19: note = Synthetic oligonucleotide
  source 1..19: mol_type = other DNA
taagacatgtcatgtttta

SEQ ID NO: 31036 - DNA, 36 bp, synthetic construct
  misc_feature 1..36: note = Synthetic oligonucleotide
  source 1..36: mol_type = other DNA
taagtatatcaaggcgaataatgaaagattctcaac

SEQ ID NO: 31037 - DNA, 36 bp, synthetic construct; identical to SEQ ID NO: 31036
  misc_feature 1..36: note = Synthetic oligonucleotide
  source 1..36: mol_type = other DNA

SEQ ID NO: 31038 - DNA, 36 bp, synthetic construct; identical to SEQ ID NO: 14867
  misc_feature 1..36: note = Synthetic oligonucleotide
  source 1..36: mol_type = other DNA

SEQ ID NO: 31039 - DNA, 36 bp, synthetic construct; identical to SEQ ID NO: 14868
  misc_feature 1..36: note = Synthetic oligonucleotide
  source 1..36: mol_type = other DNA

SEQ ID NO: 31040 - DNA, 36 bp, synthetic construct; identical to SEQ ID NO: 14868
  misc_feature 1..36: note = Synthetic oligonucleotide
  source 1..36: mol_type = other DNA

SEQ ID NO: 31041 - DNA, 36 bp, synthetic construct
  misc_feature 1..36: note = Synthetic oligonucleotide
  source 1..36: mol_type = other DNA
taagtctagcaaggatagttagtgaagattcccaac

SEQ ID NO: 31042 - DNA, 36 bp, synthetic construct; identical to SEQ ID NO: 31041
  misc_feature 1..36: note = Synthetic oligonucleotide
  source 1..36: mol_type = other DNA

SEQ ID NO: 31043 - DNA, 36 bp, synthetic construct; identical to SEQ ID NO: 31041
  misc_feature 1..36: note = Synthetic oligonucleotide
  source 1..36: mol_type = other DNA

SEQ ID NO: 31044 - DNA, 36 bp, synthetic construct; identical to SEQ ID NO: 31041
  misc_feature 1..36: note = Synthetic oligonucleotide
  source 1..36: mol_type = other DNA

SEQ ID NO: 31045 - DNA, 36 bp, synthetic construct; identical to SEQ ID NO: 14869
  misc_feature 1..36: note = Synthetic oligonucleotide
  source 1..36: mol_type = other DNA

SEQ ID NO: 31046 - DNA, 36 bp, synthetic construct; identical to SEQ ID NO: 14869
  misc_feature 1..36: note = Synthetic oligonucleotide
  source 1..36: mol_type = other DNA

SEQ ID NO: 31047 - DNA, 36 bp, synthetic construct; identical to SEQ ID NO: 14869
  misc_feature 1..36: note = Synthetic oligonucleotide
  source 1..36: mol_type = other DNA

SEQ ID NO: 31048 - DNA, 36 bp, synthetic construct; identical to SEQ ID NO: 14869
  misc_feature 1..36: note = Synthetic oligonucleotide
  source 1..36: mol_type = other DNA

SEQ ID NO: 31049 - DNA, 36 bp, synthetic construct; identical to SEQ ID NO: 14869
  misc_feature 1..36: note = Synthetic oligonucleotide
  source 1..36: mol_type = other DNA

SEQ ID NO: 31050 - DNA, 36 bp, synthetic construct; identical to SEQ ID NO: 14869
  misc_feature 1..36: note = Synthetic oligonucleotide
  source 1..36: mol_type = other DNA

SEQ ID NO: 31051 - DNA, 36 bp, synthetic construct; identical to SEQ ID NO: 14869
  misc_feature 1..36: note = Synthetic oligonucleotide
  source 1..36: mol_type = other DNA

SEQ ID NO: 31052 - DNA, 36 bp, synthetic construct; identical to SEQ ID NO: 14869
  misc_feature 1..36: note = Synthetic oligonucleotide
  source 1..36: mol_type = other DNA

SEQ ID NO: 31053 - DNA, 36 bp, synthetic construct; identical to SEQ ID NO: 14869
  misc_feature 1..36: note = Synthetic oligonucleotide
  source 1..36: mol_type = other DNA

SEQ ID NO: 31054 - DNA, 36 bp, synthetic construct; identical to SEQ ID NO: 14869
  misc_feature 1..36: note = Synthetic oligonucleotide
  source 1..36: mol_type = other DNA

SEQ ID NO: 31055 - DNA, 36 bp, synthetic construct; identical to SEQ ID NO: 14869
  misc_feature 1..36: note = Synthetic oligonucleotide
  source 1..36: mol_type = other DNA

SEQ ID NO: 31056 - DNA, 36 bp, synthetic construct; identical to SEQ ID NO: 14869
  misc_feature 1..36: note = Synthetic oligonucleotide
  source 1..36: mol_type = other DNA

SEQ ID NO: 31057 - DNA, 36 bp, synthetic construct; identical to SEQ ID NO: 14869
  misc_feature 1..36: note = Synthetic oligonucleotide
  source 1..36: mol_type = other DNA

SEQ ID NO: 31058 - DNA, 36 bp, synthetic construct; identical to SEQ ID NO: 14869
  misc_feature 1..36: note = Synthetic oligonucleotide
  source 1..36: mol_type = other DNA

SEQ ID NO: 31059 - DNA, 36 bp, synthetic construct; identical to SEQ ID NO: 14869
  misc_feature 1..36: note = Synthetic oligonucleotide
  source 1..36: mol_type = other DNA

SEQ ID NO: 31060 - DNA, 36 bp, synthetic construct; identical to SEQ ID NO: 14869
  misc_feature 1..36: note = Synthetic oligonucleotide
  source 1..36: mol_type = other DNA

SEQ ID NO: 31061 - DNA, 36 bp, synthetic construct; identical to SEQ ID NO: 14869
  misc_feature 1..36: note = Synthetic oligonucleotide
  source 1..36: mol_type = other DNA

SEQ ID NO: 31062 - DNA, 36 bp, synthetic construct; identical to SEQ ID NO: 14869
  misc_feature 1..36: note = Synthetic oligonucleotide
  source 1..36: mol_type = other DNA

SEQ ID NO: 31063 - DNA, 36 bp, synthetic construct; identical to SEQ ID NO: 14869
  misc_feature 1..36: note = Synthetic oligonucleotide
  source 1..36: mol_type = other DNA

SEQ ID NO: 31064 - DNA, 36 bp, synthetic construct; identical to SEQ ID NO: 14869
  misc_feature 1..36: note = Synthetic oligonucleotide
  source 1..36: mol_type = other DNA

SEQ ID NO: 31065 - DNA, 36 bp, synthetic construct
  misc_feature 1..36: note = Synthetic oligonucleotide
  source 1..36: mol_type = other DNA
taagtctatcaaggccacagaatgaaggttcccaac

SEQ ID NO: 31066 - DNA, 36 bp, synthetic construct; identical to SEQ ID NO: 14870
  misc_feature 1..36: note = Synthetic oligonucleotide
  source 1..36: mol_type = other DNA

SEQ ID NO: 31067 - DNA, 36 bp, synthetic construct; identical to SEQ ID NO: 14870
  misc_feature 1..36: note = Synthetic oligonucleotide
  source 1..36: mol_type = other DNA

SEQ ID NO: 31068 - DNA, 36 bp, synthetic construct; identical to SEQ ID NO: 14870
  misc_feature 1..36: note = Synthetic oligonucleotide
  source 1..36: mol_type = other DNA

SEQ ID NO: 31069 - DNA, 36 bp, synthetic construct; identical to SEQ ID NO: 14870
  misc_feature 1..36: note = Synthetic oligonucleotide
  source 1..36: mol_type = other DNA

SEQ ID NO: 31070 - DNA, 36 bp, synthetic construct; identical to SEQ ID NO: 14870
  misc_feature 1..36: note = Synthetic oligonucleotide
  source 1..36: mol_type = other DNA

SEQ ID NO: 31071 - DNA, 36 bp, synthetic construct; identical to SEQ ID NO: 14870
  misc_feature 1..36: note = Synthetic oligonucleotide
  source 1..36: mol_type = other DNA

SEQ ID NO: 31072 - DNA, 36 bp, synthetic construct; identical to SEQ ID NO: 14870
  misc_feature 1..36: note = Synthetic oligonucleotide
  source 1..36: mol_type = other DNA

SEQ ID NO: 31073 - DNA, 36 bp, synthetic construct; identical to SEQ ID NO: 14870
  misc_feature 1..36: note = Synthetic oligonucleotide
  source 1..36: mol_type = other DNA

SEQ ID NO: 31074 - DNA, 36 bp, synthetic construct; identical to SEQ ID NO: 14870
  misc_feature 1..36: note = Synthetic oligonucleotide
  source 1..36: mol_type = other DNA

SEQ ID NO: 31075 - DNA, 36 bp, synthetic construct
  misc_feature 1..36: note = Synthetic oligonucleotide
  source 1..36: mol_type = other DNA
taataatacctctacgaaattacacaactctcaaat

SEQ ID NO: 31076 - DNA, 37 bp, synthetic construct
  misc_feature 1..37: note = Synthetic oligonucleotide
  source 1..37: mol_type = other DNA
taatatcgtgttttctaatctttaatcaaaccacaac

SEQ ID NO: 31077 - DNA, 37 bp, synthetic construct
  misc_feature 1..37: note = Synthetic oligonucleotide
  source 1..37: mol_type = other DNA
taatatcgttttctctaatctttaatcaaaccacaac

SEQ ID NO: 31078 - DNA, 36 bp, synthetic construct
  misc_feature 1..36: note = Synthetic oligonucleotide
  source 1..36: mol_type = other DNA
taatctaaaaaagaacactttgttgtaaagtcaaaa

SEQ ID NO: 31079 - DNA, 20 bp, synthetic construct
  misc_feature 1..20: note = Synthetic oligonucleotide
  source 1..20: mol_type = other DNA
taattaatctctgatacttt

SEQ ID NO: 31080 - DNA, 24 bp, synthetic construct
  misc_feature 1..24: note = Synthetic oligonucleotide
  source 1..24: mol_type = other DNA
tacaaaattacactactctcaaac

SEQ ID NO: 31081 - DNA, 26 bp, synthetic construct
  misc_feature 1..26: note = Synthetic oligonucleotide
  source 1..26: mol_type = other DNA
tacaaaatttgaaagcaattcacaac

SEQ ID NO: 31082 - DNA, 26 bp, synthetic construct
  misc_feature 1..26: note = Synthetic oligonucleotide
  source 1..26: mol_type = other DNA
tacaaaatttgaaagcaattcacaac

SEQ ID NO: 31083 - DNA, 25 bp, synthetic construct
  misc_feature 1..25: note = Synthetic oligonucleotide
  source 1..25: mol_type = other DNA
tacaaatttgaaagcgaatcacaac

SEQ ID NO: 31084 - DNA, 25 bp, synthetic construct
  misc_feature 1..25: note = Synthetic oligonucleotide
  source 1..25: mol_type = other DNA
tacaaatttgaaagcgaatcacaac

SEQ ID NO: 31085 - DNA, 26 bp, synthetic construct
  misc_feature 1..26: note = Synthetic oligonucleotide
  source 1..26: mol_type = other DNA
tacaaattttgaaagtaattcacaac

SEQ ID NO: 31086 - DNA, 36 bp, synthetic construct
  misc_feature 1..36: note = Synthetic oligonucleotide
  source 1..36: mol_type = other DNA
taccacaaaggtacgtattttcaagcaaatcacaac

SEQ ID NO: 31087 - DNA, 36 bp, synthetic construct
  misc_feature 1..36: note = Synthetic oligonucleotide
  source 1..36: mol_type = other DNA
tacgtgactgtaaaacaaattacgtgactgtaaaac

SEQ ID NO: 31088 - DNA, 36 bp, synthetic construct; identical to SEQ ID NO: 31087
  misc_feature 1..36: note = Synthetic oligonucleotide
  source 1..36: mol_type = other DNA

SEQ ID NO: 31089 - DNA, 36 bp, synthetic construct; identical to SEQ ID NO: 31087
  misc_feature 1..36: note = Synthetic oligonucleotide
  source 1..36: mol_type = other DNA

SEQ ID NO: 31090 - DNA, 25 bp, synthetic construct
  misc_feature 1..25: note = Synthetic oligonucleotide
  source 1..25: mol_type = other DNA
tactaatttgaaagcaaatcacaac

SEQ ID NO: 31091 - DNA, 25 bp, synthetic construct
  misc_feature 1..25: note = Synthetic oligonucleotide
  source 1..25: mol_type = other DNA
tactaatttgaaagcaaatcacaac

SEQ ID NO: 31092 - DNA, 25 bp, synthetic construct
  misc_feature 1..25: note = Synthetic oligonucleotide
  source 1..25: mol_type = other DNA
tactaatttgaaagcaaatcacaac

SEQ ID NO: 31093 - DNA, 37 bp, synthetic construct
  misc_feature 1..37: note = Synthetic oligonucleotide
  source 1..37: mol_type = other DNA
tactgggaattagcttctacccttcttgataaacttg

SEQ ID NO: 31094 - DNA, 28 bp, synthetic construct
  misc_feature 1..28: note = Synthetic oligonucleotide
  source 1..28: mol_type = other DNA
tacttaaaattctacatcaaaccacaac

SEQ ID NO: 31095 - DNA, 37 bp, synthetic construct
  misc_feature 1..37: note = Synthetic oligonucleotide
  source 1..37: mol_type = other DNA
tagactagacgatgggaatttgcggtcaagctggaac

SEQ ID NO: 31096 - DNA, 23 bp, synthetic construct
  misc_feature 1..23: note = Synthetic oligonucleotide
  source 1..23: mol_type = other DNA
tagagacgtggcacgccgcgtct

SEQ ID NO: 31097 - DNA, 29 bp, synthetic construct
  misc_feature 1..29: note = Synthetic oligonucleotide
  source 1..29: mol_type = other DNA
tagatacaagtttgaaagcaattcacaac

SEQ ID NO: 31098 - DNA, 33 bp, synthetic construct
  misc_feature 1..33: note = Synthetic oligonucleotide
  source 1..33: mol_type = other DNA
tagccgttcagagaccgggggccaaccgcaaca

SEQ ID NO: 31099 - DNA, 37 bp, synthetic construct
  misc_feature 1..37: note = Synthetic oligonucleotide
  source 1..37: mol_type = other DNA
tagtaagtaacctacaaatttacactattctcaaacc

SEQ ID NO: 31100 - DNA, 25 bp, synthetic construct
  misc_feature 1..25: note = Synthetic oligonucleotide
  source 1..25: mol_type = other DNA
tagtaatttagaagcaaatcacaac

SEQ ID NO: 31101 - DNA, 37 bp, synthetic construct
  misc_feature 1..37: note = Synthetic oligonucleotide
  source 1..37: mol_type = other DNA
tagtgtaatcgagcggcctctccccgcagaccacggc

SEQ ID NO: 31102 - DNA, 37 bp, synthetic construct
  misc_feature 1..37: note = Synthetic oligonucleotide
  source 1..37: mol_type = other DNA
tagtgtacttgagcggcgattctcggtcatccccagc

SEQ ID NO: 31103 - DNA, 37 bp, synthetic construct
  misc_feature 1..37: note = Synthetic oligonucleotide
  source 1..37: mol_type = other DNA
tagtgtatcaaggtttggaatcccggccagccaaagc

SEQ ID NO: 31104 - DNA, 37 bp, synthetic construct
  misc_feature 1..37: note = Synthetic oligonucleotide
  source 1..37: mol_type = other DNA
tagtgtatccgagcgacgattccccgcaagccacagc

SEQ ID NO: 31105 - DNA, 38 bp, synthetic construct
  misc_feature 1..38: note = Synthetic oligonucleotide
  source 1..38: mol_type = other DNA
tagttgtggtttgatttctaattttgatgtaaaataat

SEQ ID NO: 31106 - DNA, 37 bp, synthetic construct
  misc_feature 1..37: note = Synthetic oligonucleotide
  source 1..37: mol_type = other DNA
tagtttagccgataggaattcgcggtccaaccgcaac

SEQ ID NO: 31107 - DNA, 38 bp, synthetic construct
  misc_feature 1..38: note = Synthetic oligonucleotide
  source 1..38: mol_type = other DNA
tagttttacctagtgcataaattacataactctcaaac

SEQ ID NO: 31108 - DNA, 24 bp, synthetic construct
  misc_feature 1..24: note = Synthetic oligonucleotide
  source 1..24: mol_type = other DNA
tataaaattacactactctcaaac

SEQ ID NO: 31109 - DNA, 34 bp, synthetic construct
  misc_feature 1..34: note = Synthetic oligonucleotide
  source 1..34: mol_type = other DNA
tatagttgactgtctaattaatctctgatataac

SEQ ID NO: 31110 - DNA, 26 bp, synthetic construct
  misc_feature 1..26: note = Synthetic oligonucleotide
  source 1..26: mol_type = other DNA
tatattattttacacacctttcaaac

SEQ ID NO: 31111 - DNA, 37 bp, synthetic construct
  misc_feature 1..37: note = Synthetic oligonucleotide
  source 1..37: mol_type = other DNA
tatcatatcacagcaataatctaaggggaactatgac

SEQ ID NO: 31112 - DNA, 25 bp, synthetic construct
  misc_feature 1..25: note = Synthetic oligonucleotide
  source 1..25: mol_type = other DNA
tatgaatttacactactctcaaacc

SEQ ID NO: 31113 - DNA, 29 bp, synthetic construct
  misc_feature 1..29: note = Synthetic oligonucleotide
  source 1..29: mol_type = other DNA
tatgatcgtgacggttatgacaaaaatgg

SEQ ID NO: 31114 - DNA, 35 bp, synthetic construct
  misc_feature 1..35: note = Synthetic oligonucleotide
  source 1..35: mol_type = other DNA
tatgcaaagataagaattttaaagcaaatcacaac

SEQ ID NO: 31115 - DNA, 35 bp, synthetic construct; identical to SEQ ID NO: 31114
  misc_feature 1..35: note = Synthetic oligonucleotide
  source 1..35: mol_type = other DNA

SEQ ID NO: 31116 - DNA, 36 bp, synthetic construct
  misc_feature 1..36: note = Synthetic oligonucleotide
  source 1..36: mol_type = other DNA
tatgtcaaagatactaatctgaaagcaaatcacaac

SEQ ID NO: 31117 - DNA, 26 bp, synthetic construct
  misc_feature 1..26: note = Synthetic oligonucleotide
  source 1..26: mol_type = other DNA
tatgttctttctcgtagtggtataat

SEQ ID NO: 31118 - DNA, 36 bp, synthetic construct
  misc_feature 1..36: note = Synthetic oligonucleotide
  source 1..36: mol_type = other DNA
tatgtttctgatattaatttgagagtcattcacaac

SEQ ID NO: 31119 - DNA, 37 bp, synthetic construct
  misc_feature 1..37: note = Synthetic oligonucleotide
  source 1..37: mol_type = other DNA
tattataccataccaagaaataatagggaactacagc

SEQ ID NO: 31120 - DNA, 37 bp, synthetic construct
  misc_feature 1..37: note = Synthetic oligonucleotide
  source 1..37: mol_type = other DNA
tattataccataccaagaactatcagggaactataac

SEQ ID NO: 31121 - DNA, 36 bp, synthetic construct
  misc_feature 1..36: note = Synthetic oligonucleotide
  source 1..36: mol_type = other DNA
tattataccataccaagagctattagggaactatga

SEQ ID NO: 31122 - DNA, 37 bp, synthetic construct
  misc_feature 1..37: note = Synthetic oligonucleotide
  source 1..37: mol_type = other DNA
tattataccataccaagagctattagggaactatgac

SEQ ID NO: 31123 - DNA, 37 bp, synthetic construct
  misc_feature 1..37: note = Synthetic oligonucleotide
  source 1..37: mol_type = other DNA
tattatagcaaatagaaaaaggtggtcaagccgcaac

SEQ ID NO: 31124 - DNA, 37 bp, synthetic construct
  misc_feature 1..37: note = Synthetic oligonucleotide
  source 1..37: mol_type = other DNA
tattatagcatatctgatttggaaaggaagctataac

SEQ ID NO: 31125 - DNA, 37 bp, synthetic construct
  misc_feature 1..37: note = Synthetic oligonucleotide
  source 1..37: mol_type = other DNA
tattgtagctgttcaaaattcgcggtccagccgcaac

SEQ ID NO: 31126 - DNA, 36 bp, synthetic construct
  misc_feature 1..36: note = Synthetic oligonucleotide
  source 1..36: mol_type = other DNA
tattgtctttttctcttttctacatcaaaccacaac

SEQ ID NO: 31127 - DNA, 36 bp, synthetic construct; identical to SEQ ID NO: 31126
  misc_feature 1..36: note = Synthetic oligonucleotide
  source 1..36: mol_type = other DNA

SEQ ID NO: 31128 - DNA, 36 bp, synthetic construct; identical to SEQ ID NO: 31126
  misc_feature 1..36: note = Synthetic oligonucleotide
  source 1..36: mol_type = other DNA

SEQ ID NO: 31129 - DNA, 37 bp, synthetic construct
  misc_feature 1..37: note = Synthetic oligonucleotide
  source 1..37: mol_type = other DNA
tattttagtaactggaagatttgagttaatgtaaaac

SEQ ID NO: 31130 - DNA, 33 bp, synthetic construct
  misc_feature 1..33: note = Synthetic oligonucleotide
  source 1..33: mol_type = other DNA
tcaaaatttattatcttcgtgacacgttacaac

SEQ ID NO: 31131 - DNA, 32 bp, synthetic construct
  misc_feature 1..32: note = Synthetic oligonucleotide
  source 1..32: mol_type = other DNA
tcaaagatactaaaatgaaagcaaatcacaac

SEQ ID NO: 31132 - DNA, 32 bp, synthetic construct; identical to SEQ ID NO: 31131
  misc_feature 1..32: note = Synthetic oligonucleotide
  source 1..32: mol_type = other DNA

SEQ ID NO: 31133 - DNA, 32 bp, synthetic construct; identical to SEQ ID NO: 31131
  misc_feature 1..32: note = Synthetic oligonucleotide
  source 1..32: mol_type = other DNA

SEQ ID NO: 31134 - DNA, 32 bp, synthetic construct
  misc_feature 1..32: note = Synthetic oligonucleotide
  source 1..32: mol_type = other DNA
tcaaagatactaattcgaaagcaaatcacaac

SEQ ID NO: 31135 - DNA, 32 bp, synthetic construct
  misc_feature 1..32: note = Synthetic oligonucleotide
  source 1..32: mol_type = other DNA
tcaaagatactaatttgaaagcaaatcacaac

SEQ ID NO: 31136 - DNA, 32 bp, synthetic construct; identical to SEQ ID NO: 31135
  misc_feature 1..32: note = Synthetic oligonucleotide
  source 1..32: mol_type = other DNA

SEQ ID NO: 31137 - DNA, 32 bp, synthetic construct; identical to SEQ ID NO: 31135
  misc_feature 1..32: note = Synthetic oligonucleotide
  source 1..32: mol_type = other DNA

SEQ ID NO: 31138 - DNA, 32 bp, synthetic construct; identical to SEQ ID NO: 31135
  misc_feature 1..32: note = Synthetic oligonucleotide
  source 1..32: mol_type = other DNA

SEQ ID NO: 31139 - DNA, 31 bp, synthetic construct
  misc_feature 1..31: note = Synthetic oligonucleotide
  source 1..31: mol_type = other DNA
tcaaattcgtaactttgtgacctcaaacaac

SEQ ID NO: 31140 - DNA, 32 bp, synthetic construct
  misc_feature 1..32: note = Synthetic oligonucleotide
  source 1..32: mol_type = other DNA
tcaaattttgtagttttgtgattgataacaac

SEQ ID NO: 31141 - DNA, 29 bp, synthetic construct
  misc_feature 1..29: note = Synthetic oligonucleotide
  source 1..29: mol_type = other DNA
tcacaaagatacaaattttgaaagtaatt

SEQ ID NO: 31142 - DNA, 35 bp, synthetic construct
  misc_feature 1..35: note = Synthetic oligonucleotide
  source 1..35: mol_type = other DNA
tcacaaagatacaaattttgaaagtaattcacaac

SEQ ID NO: 31143 - DNA, 35 bp, synthetic construct; identical to SEQ ID NO: 31142
  misc_feature 1..35: note = Synthetic oligonucleotide
  source 1..35: mol_type = other DNA

SEQ ID NO: 31144 - DNA, 28 bp, synthetic construct
  misc_feature 1..28: note = Synthetic oligonucleotide
  source 1..28: mol_type = other DNA
tcacaaagttacgaatttgaaagcaact

SEQ ID NO: 31145 - DNA, 34 bp, synthetic construct
  misc_feature 1..34: note = Synthetic oligonucleotide
  source 1..34: mol_type = other DNA
tcacaaagttacgaatttgaaagcaactcacaac

SEQ ID NO: 31146 - DNA, 23 bp, synthetic construct
  misc_feature 1..23: note = Synthetic oligonucleotide
  source 1..23: mol_type = other DNA
tcacctcgagagggaacggaaac

SEQ ID NO: 31147 - DNA, 35 bp, synthetic construct
  misc_feature 1..35: note = Synthetic oligonucleotide
  source 1..35: mol_type = other DNA
tcactaaaattagtattctgaaagcaattcacaac

SEQ ID NO: 31148 - DNA, 36 bp, synthetic construct
  misc_feature 1..36: note = Synthetic oligonucleotide
  source 1..36: mol_type = other DNA
tcagtatagcacagggagaaatggatatttcccagc

SEQ ID NO: 31149 - DNA, 38 bp, synthetic construct
  misc_feature 1..38: note = Synthetic oligonucleotide
  source 1..38: mol_type = other DNA
tcatcacgaaattacttgatacgaatgcaaatcacaac

SEQ ID NO: 31150 - DNA, 25 bp, synthetic construct
  misc_feature 1..25: note = Synthetic oligonucleotide
  source 1..25: mol_type = other DNA
tcatccccgctcacgcggggaaaac

SEQ ID NO: 31151 - DNA, 36 bp, synthetic construct
  misc_feature 1..36: note = Synthetic oligonucleotide
  source 1..36: mol_type = other DNA
tccggaacaagttgacgagaagctcttttacatacc

SEQ ID NO: 31152 - DNA, 27 bp, synthetic construct
  misc_feature 1..27: note = Synthetic oligonucleotide
  source 1..27: mol_type = other DNA
tccgttgtggtttgattaaagattaga

SEQ ID NO: 31153 - DNA, 19 bp, synthetic construct
  misc_feature 1..19: note = Synthetic oligonucleotide
  source 1..19: mol_type = other DNA
tcctttgctactatcctaa

SEQ ID NO: 31154 - DNA, 19 bp, synthetic construct
  misc_feature 1..19: note = Synthetic oligonucleotide
  source 1..19: mol_type = other DNA
tcctttgctactatcctaa

SEQ ID NO: 31155 - DNA, 19 bp, synthetic construct
  misc_feature 1..19: note = Synthetic oligonucleotide
  source 1..19: mol_type = other DNA
tctaacaatcatctaaaac

SEQ ID NO: 31156 - DNA, 20 bp, synthetic construct
  misc_feature 1..20: note = Synthetic oligonucleotide
  source 1..20: mol_type = other DNA
tctaacaatcatctaaaacc

SEQ ID NO: 31157 - DNA, 38 bp, synthetic construct
  misc_feature 1..38: note = Synthetic oligonucleotide
  source 1..38: mol_type = other DNA
tctaccgcaaaggtagttaattctgagcaaatcacaac

SEQ ID NO: 31158 - DNA, 19 bp, synthetic construct
  misc_feature 1..19: note = Synthetic oligonucleotide
  source 1..19: mol_type = other DNA
tctacggtgcctccgaaac

SEQ ID NO: 31159 - DNA, 28 bp, synthetic construct
  misc_feature 1..28: note = Synthetic oligonucleotide
  source 1..28: mol_type = other DNA
tctctgatgaatattgataaacttatac

SEQ ID NO: 31160 - DNA, 28 bp, synthetic construct
  misc_feature 1..28: note = Synthetic oligonucleotide
  source 1..28: mol_type = other DNA
tctcttctcttcgttagcaagccacaac

SEQ ID NO: 31161 - DNA, 32 bp, synthetic construct
  misc_feature 1..32: note = Synthetic oligonucleotide
  source 1..32: mol_type = other DNA
tctgtatgcaatctatcaaagaacacaatctg

SEQ ID NO: 31162 - DNA, 37 bp, synthetic construct
  misc_feature 1..37: note = Synthetic oligonucleotide
  source 1..37: mol_type = other DNA
tcttacaatcgacacttaaataatttgcatgtgtaag

SEQ ID NO: 31163 - DNA, 36 bp, synthetic construct
  misc_feature 1..36: note = Synthetic oligonucleotide
  source 1..36: mol_type = other DNA
tcttgattatcttaacaatctcccaggtagtaaaat

SEQ ID NO: 31164 - DNA, 35 bp, synthetic construct
  misc_feature 1..35: note = Synthetic oligonucleotide
  source 1..35: mol_type = other DNA
tcttgtatctatacagaattacacatttctcaaac

SEQ ID NO: 31165 - DNA, 32 bp, synthetic construct
  misc_feature 1..32: note = Synthetic oligonucleotide
  source 1..32: mol_type = other DNA
tgaaggtaaggaatctgaaagctaatcacaac

SEQ ID NO: 31166 - DNA, 32 bp, synthetic construct
  misc_feature 1..32: note = Synthetic oligonucleotide
  source 1..32: mol_type = other DNA
tgaaggtacgaaatctgaaagctaatcacaac

SEQ ID NO: 31167 - DNA, 32 bp, synthetic construct; identical to SEQ ID NO: 31166
  misc_feature 1..32: note = Synthetic oligonucleotide
  source 1..32: mol_type = other DNA

SEQ ID NO: 31168 - DNA, 32 bp, synthetic construct; identical to SEQ ID NO: 31166
  misc_feature 1..32: note = Synthetic oligonucleotide
  source 1..32: mol_type = other DNA

SEQ ID NO: 31169 - DNA, 32 bp, synthetic construct
  misc_feature 1..32: note = Synthetic oligonucleotide
  source 1..32: mol_type = other DNA
tgaaggtacgaaatctgaaagctaatcacagc

SEQ ID NO: 31170 - DNA, 32 bp, synthetic construct; identical to SEQ ID NO: 31169
  misc_feature 1..32: note = Synthetic oligonucleotide
  source 1..32: mol_type = other DNA

SEQ ID NO: 31171 - DNA, 32 bp, synthetic construct; identical to SEQ ID NO: 14914
  misc_feature 1..32: note = Synthetic oligonucleotide
  source 1..32: mol_type = other DNA

SEQ ID NO: 31172 - DNA, 32 bp, synthetic construct; identical to SEQ ID NO: 14914
  misc_feature 1..32: note = Synthetic oligonucleotide
  source 1..32: mol_type = other DNA

SEQ ID NO: 31173 - DNA, 26 bp, synthetic construct
  misc_feature 1..26: note = Synthetic oligonucleotide
  source 1..26: mol_type = other DNA
tgatagtacaaagatactaattttaa

SEQ ID NO: 31174 - DNA, 32 bp, synthetic construct
  misc_feature 1..32: note = Synthetic oligonucleotide
  source 1..32: mol_type = other DNA
tgcaaagatacaaatttgaaagcaattcacaa

SEQ ID NO: 31175 - DNA, 33 bp, synthetic construct
  misc_feature 1..33: note = Synthetic oligonucleotide
  source 1..33: mol_type = other DNA
tgcaaagttatcaaaatgttagcaattcacaac

SEQ ID NO: 31176 - DNA, 36 bp, synthetic construct
  misc_feature 1..36: note = Synthetic oligonucleotide
  source 1..36: mol_type = other DNA
tgcatggtattctctaatctttaatcaaaccacaac

SEQ ID NO: 31177 - DNA, 37 bp, synthetic construct
  misc_feature 1..37: note = Synthetic oligonucleotide
  source 1..37: mol_type = other DNA
tgccgtggttgacctcctgatttcaagtcgctacaat

SEQ ID NO: 31178 - DNA, 34 bp, synthetic construct
  misc_feature 1..34: note = Synthetic oligonucleotide
  source 1..34: mol_type = other DNA
tgcggttggcccgcattcccccatcggctaaact

SEQ ID NO: 31179 - DNA, 37 bp, synthetic construct
  misc_feature 1..37: note = Synthetic oligonucleotide
  source 1..37: mol_type = other DNA
tgctgtggtttgcggggaatcgtcgctcggatacact

SEQ ID NO: 31180 - DNA, 37 bp, synthetic construct
  misc_feature 1..37: note = Synthetic oligonucleotide
  source 1..37: mol_type = other DNA
tgctttgccttgattccaaatctgctctttgcacaat

SEQ ID NO: 31181 - DNA, 36 bp, synthetic construct
  misc_feature 1..36: note = Synthetic oligonucleotide
  source 1..36: mol_type = other DNA
tggttcaaagatactaaaatgaaagcaaatcacaac

SEQ ID NO: 31182 - DNA, 36 bp, synthetic construct; identical to SEQ ID NO: 31181
  misc_feature 1..36: note = Synthetic oligonucleotide
  source 1..36: mol_type = other DNA

SEQ ID NO: 31183 - DNA, 36 bp, synthetic construct
  misc_feature 1..36: note = Synthetic oligonucleotide
  source 1..36: mol_type = other DNA
tggtttgagcgtagtaatttaataacaaacttgaac

SEQ ID NO: 31184 - DNA, 24 bp, synthetic construct
  misc_feature 1..24: note = Synthetic oligonucleotide
  source 1..24: mol_type = other DNA
tgtagttttatatggttgtaaaac

SEQ ID NO: 31185 - DNA, 24 bp, synthetic construct
  misc_feature 1..24: note = Synthetic oligonucleotide
  source 1..24: mol_type = other DNA
tgtagttttatatggttgtaaaac

SEQ ID NO: 31186 - DNA, 37 bp, synthetic construct; identical to SEQ ID NO: 14934
  misc_feature 1..37: note = Synthetic oligonucleotide
  source 1..37: mol_type = other DNA

SEQ ID NO: 31187 - DNA, 34 bp, synthetic construct
  misc_feature 1..34: note = Synthetic oligonucleotide
  source 1..34: mol_type = other DNA
tgtcaaagatacaaacttgaaagcgaatcacaac

SEQ ID NO: 31188 - DNA, 34 bp, synthetic construct; identical to SEQ ID NO: 31187
  misc_feature 1..34: note = Synthetic oligonucleotide
  source 1..34: mol_type = other DNA

SEQ ID NO: 31189 - DNA, 34 bp, synthetic construct; identical to SEQ ID NO: 31187
  misc_feature 1..34: note = Synthetic oligonucleotide
  source 1..34: mol_type = other DNA

SEQ ID NO: 31190 - DNA, 34 bp, synthetic construct
  misc_feature 1..34: note = Synthetic oligonucleotide
  source 1..34: mol_type = other DNA
tgtcaaagatacaaatttgaaagcgaatcacaac

SEQ ID NO: 31191 - DNA, 38 bp, synthetic construct
  misc_feature 1..38: note = Synthetic oligonucleotide
  source 1..38: mol_type = other DNA
tgtcacgaagataataaattttgaaagcaattcacaac

SEQ ID NO: 31192 - DNA, 29 bp, synthetic construct
  misc_feature 1..29: note = Synthetic oligonucleotide
  source 1..29: mol_type = other DNA
tgtgaattgctttcaaattttgtagtttt

SEQ ID NO: 31193 - DNA, 32 bp, synthetic construct
  misc_feature 1..32: note = Synthetic oligonucleotide
  source 1..32: mol_type = other DNA
tgttaccattcaaaataacattgttctaaaac

SEQ ID NO: 31194 - DNA, 37 bp, synthetic construct
  misc_feature 1..37: note = Synthetic oligonucleotide
  source 1..37: mol_type = other DNA
tgttagagatactcataagataacattactctcaaac

SEQ ID NO: 31195 - DNA, 36 bp, synthetic construct
  misc_feature 1..36: note = Synthetic oligonucleotide
  source 1..36: mol_type = other DNA
tgttatagcccccatctcactcggttttgctataat

SEQ ID NO: 31196 - DNA, 38 bp, synthetic construct
  misc_feature 1..38: note = Synthetic oligonucleotide
  source 1..38: mol_type = other DNA
tgttatcaatcacaaaactacaaaatttgaaagcaatt

SEQ ID NO: 31197 - DNA, 37 bp, synthetic construct
  misc_feature 1..37: note = Synthetic oligonucleotide
  source 1..37: mol_type = other DNA
tgttgcggattgataccgggctgaggttggttacact

SEQ ID NO: 31198 - DNA, 38 bp, synthetic construct
  misc_feature 1..38: note = Synthetic oligonucleotide
  source 1..38: mol_type = other DNA
tgttgtagttccctaacagttcttggtatggtataata

SEQ ID NO: 31199 - DNA, 37 bp, synthetic construct
  misc_feature 1..37: note = Synthetic oligonucleotide
  source 1..37: mol_type = other DNA
tgttgtatatcatccttttcctacatcaaaccacaac

SEQ ID NO: 31200 - DNA, 34 bp, synthetic construct
  misc_feature 1..34: note = Synthetic oligonucleotide
  source 1..34: mol_type = other DNA
tgttgtgaattgctttcaaattttgtagttttgt

SEQ ID NO: 31201 - DNA, 37 bp, synthetic construct
  misc_feature 1..37: note = Synthetic oligonucleotide
  source 1..37: mol_type = other DNA
tgttgtggattgatcccgggtcaggatcggttacact

SEQ ID NO: 31202 - DNA, 38 bp, synthetic construct
  misc_feature 1..38: note = Synthetic oligonucleotide
  source 1..38: mol_type = other DNA
tgttgttgttcccagttatcgcttggtatgatataatt

SEQ ID NO: 31203 - DNA, 36 bp, synthetic construct
  misc_feature 1..36: note = Synthetic oligonucleotide
  source 1..36: mol_type = other DNA
tgtttacactcttctgaattaacaaagctctcaaac

SEQ ID NO: 31204 - DNA, 36 bp, synthetic construct
  misc_feature 1..36: note = Synthetic oligonucleotide
  source 1..36: mol_type = other DNA
tgtttagttcccttttaatttttggtatggtataat

SEQ ID NO: 31205 - DNA, 38 bp, synthetic construct
  misc_feature 1..38: note = Synthetic oligonucleotide
  source 1..38: mol_type = other DNA
tgtttcattactatctaaaacaacataattctaaaacc

SEQ ID NO: 31206 - DNA, 29 bp, synthetic construct
  misc_feature 1..29: note = Synthetic oligonucleotide
  source 1..29: mol_type = other DNA
tgtttccaatggatcaaagatactaattt

SEQ ID NO: 31207 - DNA, 29 bp, synthetic construct
  misc_feature 1..29: note = Synthetic oligonucleotide
  source 1..29: mol_type = other DNA
tgtttccaatggatcaaagatactaattt

SEQ ID NO: 31208 - DNA, 29 bp, synthetic construct
  misc_feature 1..29: note = Synthetic oligonucleotide
  source 1..29: mol_type = other DNA
tgtttccaatggatcaaagatactaattt

SEQ ID NO: 31209 - DNA, 37 bp, synthetic construct; identical to SEQ ID NO: 14958
  misc_feature 1..37: note = Synthetic oligonucleotide
  source 1..37: mol_type = other DNA

SEQ ID NO: 31210 - DNA, 36 bp, synthetic construct; identical to SEQ ID NO: 14959
  misc_feature 1..36: note = Synthetic oligonucleotide
  source 1..36: mol_type = other DNA

SEQ ID NO: 31211 - DNA, 36 bp, synthetic construct; identical to SEQ ID NO: 14959
  misc_feature 1..36: note = Synthetic oligonucleotide
  source 1..36: mol_type = other DNA

SEQ ID NO: 31212 - DNA, 37 bp, synthetic construct
  misc_feature 1..37: note = Synthetic oligonucleotide
  source 1..37: mol_type = other DNA
tgtttgttttccctacgaatttacactgctctcaaac

SEQ ID NO: 31213 - DNA, 37 bp, synthetic construct
  misc_feature 1..37: note = Synthetic oligonucleotide
  source 1..37: mol_type = other DNA
tgttttaatacccctacaaacaacggtgtgatacaat

SEQ ID NO: 31214 - DNA, 37 bp, synthetic construct
  misc_feature 1..37: note = Synthetic oligonucleotide
  source 1..37: mol_type = other DNA
tgttttaatctcctattaacttacaaggttctcaaac

SEQ ID NO: 31215 - DNA, 37 bp, synthetic construct
  misc_feature 1..37: note = Synthetic oligonucleotide
  source 1..37: mol_type = other DNA
tgttttacagtcacgtaatttgtttaggtactaaaat

SEQ ID NO: 31216 - DNA, 37 bp, synthetic construct
  misc_feature 1..37: note = Synthetic oligonucleotide
  source 1..37: mol_type = other DNA
tgttttacctacttcttgatttacaaggttctcaaac

SEQ ID NO: 31217 - DNA, 37 bp, synthetic construct
  misc_feature 1..37: note = Synthetic oligonucleotide
  source 1..37: mol_type = other DNA
tgttttactaccctataaaattacactactctcaaac

SEQ ID NO: 31218 - DNA, 37 bp, synthetic construct
  misc_feature 1..37: note = Synthetic oligonucleotide
  source 1..37: mol_type = other DNA
tgttttactaccttatagatttacactattctcaaac

SEQ ID NO: 31219 - DNA, 37 bp, synthetic construct
  misc_feature 1..37: note = Synthetic oligonucleotide
  source 1..37: mol_type = other DNA
tgttttattaccattcaaaataacatactcctaaaac

SEQ ID NO: 31220 - DNA, 36 bp, synthetic construct
  misc_feature 1..36: note = Synthetic oligonucleotide
  source 1..36: mol_type = other DNA
tgttttcaatggttcaaagatactaatttgaaagca

SEQ ID NO: 31221 - DNA, 36 bp, synthetic construct; identical to SEQ ID NO: 31220
  misc_feature 1..36: note = Synthetic oligonucleotide
  source 1..36: mol_type = other DNA

SEQ ID NO: 31222 - DNA, 36 bp, synthetic construct
  misc_feature 1..36: note = Synthetic oligonucleotide
  source 1..36: mol_type = other DNA
tgttttctaccatatgaatctacactactctcaaac

SEQ ID NO: 31223 - DNA, 37 bp, synthetic construct
  misc_feature 1..37: note = Synthetic oligonucleotide
  source 1..37: mol_type = other DNA
tgttttgttaccattcaaaataacatactcctaaaat

SEQ ID NO: 31224 - DNA, 37 bp, synthetic construct
  misc_feature 1..37: note = Synthetic oligonucleotide
  source 1..37: mol_type = other DNA
ttaagtgtaccaaggtgaataatgaaagattctcaac

SEQ ID NO: 31225 - DNA, 33 bp, synthetic construct
  misc_feature 1..33: note = Synthetic oligonucleotide
  source 1..33: mol_type = other DNA
ttaatctagcaaaaatccatatggtaacaaaac

SEQ ID NO: 31226 - DNA, 30 bp, synthetic construct
  misc_feature 1..30: note = Synthetic oligonucleotide
  source 1..30: mol_type = other DNA
ttaccattcaaaataacatactcctaaaac

SEQ ID NO: 31227 - DNA, 30 bp, synthetic construct
  misc_feature 1..30: note = Synthetic oligonucleotide
  source 1..30: mol_type = other DNA
ttaccattcaaaataacatactcctaaaat

SEQ ID NO: 31228 - DNA, 30 bp, synthetic construct
  misc_feature 1..30: note = Synthetic oligonucleotide
  source 1..30: mol_type = other DNA
ttaccattcaaaataacattgttctaaaac

SEQ ID NO: 31229 - DNA, 30 bp, synthetic construct; identical to SEQ ID NO: 31228
  misc_feature 1..30: note = Synthetic oligonucleotide
  source 1..30: mol_type = other DNA

SEQ ID NO: 31230 - DNA, 30 bp, synthetic construct; identical to SEQ ID NO: 31228
  misc_feature 1..30: note = Synthetic oligonucleotide
  source 1..30: mol_type = other DNA

SEQ ID NO: 31231 - DNA, 30 bp, synthetic construct; identical to SEQ ID NO: 31228
  misc_feature 1..30: note = Synthetic oligonucleotide
  source 1..30: mol_type = other DNA

SEQ ID NO: 31232 - DNA, 30 bp, synthetic construct; identical to SEQ ID NO: 31228
  misc_feature 1..30: note = Synthetic oligonucleotide
  source 1..30: mol_type = other DNA

SEQ ID NO: 31233 - DNA, 31 bp, synthetic construct
  misc_feature 1..31: note = Synthetic oligonucleotide
  source 1..31: mol_type = other DNA
ttacccctatgaatttacactgctctcaaac

SEQ ID NO: 31234 - DNA, 26 bp, synthetic construct
  misc_feature 1..26: note = Synthetic oligonucleotide
  source 1..26: mol_type = other DNA
ttacgaatttgaaagcaactcacaac

SEQ ID NO: 31235 - DNA, 29 bp, synthetic construct
  misc_feature 1..29: note = Synthetic oligonucleotide
  source 1..29: mol_type = other DNA
ttactgcaaagatacactttttgaagcaa

SEQ ID NO: 31236 - DNA, 30 bp, synthetic construct
  misc_feature 1..30: note = Synthetic oligonucleotide
  source 1..30: mol_type = other DNA
ttagatacaagtttgaaagcaattcacaac

SEQ ID NO: 31237 - DNA, 21 bp, synthetic construct
  misc_feature 1..21: note = Synthetic oligonucleotide
  source 1..21: mol_type = other DNA
ttataccactacgagaaaata

SEQ ID NO: 31238 - DNA, 21 bp, synthetic construct
  misc_feature 1..21: note = Synthetic oligonucleotide
  source 1..21: mol_type = other DNA
ttataccactacgagaaaata

SEQ ID NO: 31239 - DNA, 33 bp, synthetic construct
  misc_feature 1..33: note = Synthetic oligonucleotide
  source 1..33: mol_type = other DNA
ttatacctctatgaatttacattactctcaaac

SEQ ID NO: 31240 - DNA, 35 bp, synthetic construct
  misc_feature 1..35: note = Synthetic oligonucleotide
  source 1..35: mol_type = other DNA
ttatagcatatctgatttggaaaggaagctataac

SEQ ID NO: 31241 - DNA, 35 bp, synthetic construct
  misc_feature 1..35: note = Synthetic oligonucleotide
  source 1..35: mol_type = other DNA
ttatagcttcctttccaaatcagatatgctataat

SEQ ID NO: 31242 - DNA, 25 bp, synthetic construct
  misc_feature 1..25: note = Synthetic oligonucleotide
  source 1..25: mol_type = other DNA
ttatgaaattacactactctcaaac

SEQ ID NO: 31243 - DNA, 33 bp, synthetic construct
  misc_feature 1..33: note = Synthetic oligonucleotide
  source 1..33: mol_type = other DNA
ttattctagcaaaaaatcatatggtaacaaaac

SEQ ID NO: 31244 - DNA, 34 bp, synthetic construct; identical to SEQ ID NO: 14971
  misc_feature 1..34: note = Synthetic oligonucleotide
  source 1..34: mol_type = other DNA

SEQ ID NO: 31245 - DNA, 29 bp, synthetic construct
  misc_feature 1..29: note = Synthetic oligonucleotide
  source 1..29: mol_type = other DNA
ttccctaatagctcttggtatggtataat

SEQ ID NO: 31246 - DNA, 35 bp, synthetic construct
  misc_feature 1..35: note = Synthetic oligonucleotide
  source 1..35: mol_type = other DNA
ttccgataccccaccatcggaatgcctgatatact

SEQ ID NO: 31247 - DNA, 35 bp, synthetic construct; identical to SEQ ID NO: 31246
  misc_feature 1..35: note = Synthetic oligonucleotide
  source 1..35: mol_type = other DNA

SEQ ID NO: 31248 - DNA, 19 bp, synthetic construct
  misc_feature 1..19: note = Synthetic oligonucleotide
  source 1..19: mol_type = other DNA
ttctgagtaaactgaatta

SEQ ID NO: 31249 - DNA, 36 bp, synthetic construct
  misc_feature 1..36: note = Synthetic oligonucleotide
  source 1..36: mol_type = other DNA
ttcttgagcacgcggccttccccaaggcgatacgct

SEQ ID NO: 31250 - DNA, 27 bp, synthetic construct
  misc_feature 1..27: note = Synthetic oligonucleotide
  source 1..27: mol_type = other DNA
ttgaccgtctaattaatctctgatact

SEQ ID NO: 31251 - DNA, 28 bp, synthetic construct
  misc_feature 1..28: note = Synthetic oligonucleotide
  source 1..28: mol_type = other DNA
ttgacgccaaaacctgatttccaaaagt

SEQ ID NO: 31252 - DNA, 38 bp, synthetic construct
  misc_feature 1..38: note = Synthetic oligonucleotide
  source 1..38: mol_type = other DNA
ttgctggggcttgacaggaattttcgttctggtataat

SEQ ID NO: 31253 - DNA, 37 bp, synthetic construct
  misc_feature 1..37: note = Synthetic oligonucleotide
  source 1..37: mol_type = other DNA
ttgctttcaaattcgtaactttgtgacctcaaacaac

SEQ ID NO: 31254 - DNA, 37 bp, synthetic construct; identical to SEQ ID NO: 31253
  misc_feature 1..37: note = Synthetic oligonucleotide
  source 1..37: mol_type = other DNA

SEQ ID NO: 31255 - DNA, 37 bp, synthetic construct; identical to SEQ ID NO: 31253
  misc_feature 1..37: note = Synthetic oligonucleotide
  source 1..37: mol_type = other DNA

SEQ ID NO: 31256 - DNA, 37 bp, synthetic construct
  misc_feature 1..37: note = Synthetic oligonucleotide
  source 1..37: mol_type = other DNA
ttgctttcaaattcgtaattttgtgacctcaaacaac

SEQ ID NO: 31257 - DNA, 37 bp, synthetic construct
  misc_feature 1..37: note = Synthetic oligonucleotide
  source 1..37: mol_type = other DNA
ttgctttcaaattcgtaattttgtgatctcaaacaac

SEQ ID NO: 31258 - DNA, 37 bp, synthetic construct; identical to SEQ ID NO: 31257
  misc_feature 1..37: note = Synthetic oligonucleotide
  source 1..37: mol_type = other DNA

SEQ ID NO: 31259 - DNA, 37 bp, synthetic construct; identical to SEQ ID NO: 31257
  misc_feature 1..37: note = Synthetic oligonucleotide
  source 1..37: mol_type = other DNA

SEQ ID NO: 31260 - DNA, 37 bp, synthetic construct; identical to SEQ ID NO: 31257
  misc_feature 1..37: note = Synthetic oligonucleotide
  source 1..37: mol_type = other DNA

SEQ ID NO: 31261 - DNA, 37 bp, synthetic construct; identical to SEQ ID NO: 31257
  misc_feature 1..37: note = Synthetic oligonucleotide
  source 1..37: mol_type = other DNA

SEQ ID NO: 31262 - DNA, 37 bp, synthetic construct; identical to SEQ ID NO: 31257
  misc_feature 1..37: note = Synthetic oligonucleotide
  source 1..37: mol_type = other DNA

SEQ ID NO: 31263 - DNA, 37 bp, synthetic construct
  misc_feature 1..37: note = Synthetic oligonucleotide
  source 1..37: mol_type = other DNA
ttgctttcaaatttgtaactttgtgacctcaaacaac

SEQ ID NO: 31264 - DNA, 33 bp, synthetic construct
  misc_feature 1..33: note = Synthetic oligonucleotide
  source 1..33: mol_type = other DNA
ttggaaccattcgaaacaacacagctctaaaac

SEQ ID NO: 31265 - DNA, 38 bp, synthetic construct
  misc_feature 1..38: note = Synthetic oligonucleotide
  source 1..38: mol_type = other DNA
ttggttcttaactacatgaaatgacgtacttctaaaac

SEQ ID NO: 31266 - DNA, 35 bp, synthetic construct
  misc_feature 1..35: note = Synthetic oligonucleotide
  source 1..35: mol_type = other DNA
ttgtaataagtaaacaaataatatataatttaagt

SEQ ID NO: 31267 - DNA, 35 bp, synthetic construct
  misc_feature 1..35: note = Synthetic oligonucleotide
  source 1..35: mol_type = other DNA
ttgtagctccctctctcaccccggaaagctacaat

SEQ ID NO: 31268 - DNA, 36 bp, synthetic construct
  misc_feature 1..36: note = Synthetic oligonucleotide
  source 1..36: mol_type = other DNA
ttgtagttgcggttggcttttccagagtgctaaacc

SEQ ID NO: 31269 - DNA, 35 bp, synthetic construct
  misc_feature 1..35: note = Synthetic oligonucleotide
  source 1..35: mol_type = other DNA
ttgtatatcattataatcctacatcaaaccgcaac

SEQ ID NO: 31270 - DNA, 35 bp, synthetic construct
  misc_feature 1..35: note = Synthetic oligonucleotide
  source 1..35: mol_type = other DNA
ttgtatcctattcagtttctacatcaaaccacaac

SEQ ID NO: 31271 - DNA, 31 bp, synthetic construct
  misc_feature 1..31: note = Synthetic oligonucleotide
  source 1..31: mol_type = other DNA
ttgtgattagctttcagattccgtaccttca

SEQ ID NO: 31272 - DNA, 31 bp, synthetic construct; identical to SEQ ID NO: 31271
  misc_feature 1..31: note = Synthetic oligonucleotide
  source 1..31: mol_type = other DNA

SEQ ID NO: 31273 - DNA, 35 bp, synthetic construct
  misc_feature 1..35: note = Synthetic oligonucleotide
  source 1..35: mol_type = other DNA
ttgtgatttgatggttttcaaggatgtgctatatt

SEQ ID NO: 31274 - DNA, 35 bp, synthetic construct; identical to SEQ ID NO: 31273
  misc_feature 1..35: note = Synthetic oligonucleotide
  source 1..35: mol_type = other DNA

SEQ ID NO: 31275 - DNA, 35 bp, synthetic construct
  misc_feature 1..35: note = Synthetic oligonucleotide
  source 1..35: mol_type = other DNA
ttgtgatttgcatttaggtgatagtcggttacaat

SEQ ID NO: 31276 - DNA, 29 bp, synthetic construct
  misc_feature 1..29: note = Synthetic oligonucleotide
  source 1..29: mol_type = other DNA
ttgtgatttgctttcaaattagtatcttt

SEQ ID NO: 31277 - DNA, 29 bp, synthetic construct
  misc_feature 1..29: note = Synthetic oligonucleotide
  source 1..29: mol_type = other DNA
ttgtgatttgctttcaaattagtatcttt

SEQ ID NO: 31278 - DNA, 35 bp, synthetic construct
  misc_feature 1..35: note = Synthetic oligonucleotide
  source 1..35: mol_type = other DNA
ttgtggcttgcactcagacgcggatcagttacaat

SEQ ID NO: 31279 - DNA, 38 bp, synthetic construct
  misc_feature 1..38: note = Synthetic oligonucleotide
  source 1..38: mol_type = other DNA
ttgttttaaatatcttcaaagaacaaattgaaagcaaa

SEQ ID NO: 31280 - DNA, 38 bp, synthetic construct
  misc_feature 1..38: note = Synthetic oligonucleotide
  source 1..38: mol_type = other DNA
ttgttttgtatctttttgaattagcaaagctctcaaac

SEQ ID NO: 31281 - DNA, 26 bp, synthetic construct
  misc_feature 1..26: note = Synthetic oligonucleotide
  source 1..26: mol_type = other DNA
tttacagaattacactactctcaaac

SEQ ID NO: 31282 - DNA, 26 bp, synthetic construct
  misc_feature 1..26: note = Synthetic oligonucleotide
  source 1..26: mol_type = other DNA
tttacagaattacactactctcaaac

SEQ ID NO: 31283 - DNA, 23 bp, synthetic construct
  misc_feature 1..23: note = Synthetic oligonucleotide
  source 1..23: mol_type = other DNA
tttatatgacacatcacccaaaa

SEQ ID NO: 31284 - DNA, 29 bp, synthetic construct
  misc_feature 1..29: note = Synthetic oligonucleotide
  source 1..29: mol_type = other DNA
tttatcaatattcatcagagagccaaaac

SEQ ID NO: 31285 - DNA, 34 bp, synthetic construct
  misc_feature 1..34: note = Synthetic oligonucleotide
  source 1..34: mol_type = other DNA
tttcaaattagtacagaagcatatcataaacatc

SEQ ID NO: 31286 - DNA, 32 bp, synthetic construct
  misc_feature 1..32: note = Synthetic oligonucleotide
  source 1..32: mol_type = other DNA
tttcaacccacgcgccccttgcggggcgcgac

SEQ ID NO: 31287 - DNA, 29 bp, synthetic construct
  misc_feature 1..29: note = Synthetic oligonucleotide
  source 1..29: mol_type = other DNA
tttcaatttcaatatggttcgattgagag

SEQ ID NO: 31288 - DNA, 35 bp, synthetic construct
  misc_feature 1..35: note = Synthetic oligonucleotide
  source 1..35: mol_type = other DNA
tttcagtaccttatgaaattacactactctcaaac

SEQ ID NO: 31289 - DNA, 36 bp, synthetic construct
  misc_feature 1..36: note = Synthetic oligonucleotide
  source 1..36: mol_type = other DNA
tttcagtgaccaaagtcttacgaagctacttcaacc

SEQ ID NO: 31290 - DNA, 35 bp, synthetic construct
  misc_feature 1..35: note = Synthetic oligonucleotide
  source 1..35: mol_type = other DNA
tttcattttagtatctttgaaccataggaaacagt

SEQ ID NO: 31291 - DNA, 35 bp, synthetic construct; identical to SEQ ID NO: 31290
  misc_feature 1..35: note = Synthetic oligonucleotide
  source 1..35: mol_type = other DNA

SEQ ID NO: 31292 - DNA, 26 bp, synthetic construct
  misc_feature 1..26: note = Synthetic oligonucleotide
  source 1..26: mol_type = other DNA
tttccagaatcacactactctcaaac

SEQ ID NO: 31293 - DNA, 34 bp, synthetic construct
  misc_feature 1..34: note = Synthetic oligonucleotide
  source 1..34: mol_type = other DNA
tttcctaccatccaaaattacatatacctaaaac

SEQ ID NO: 31294 - DNA, 19 bp, synthetic construct
  misc_feature 1..19: note = Synthetic oligonucleotide
  source 1..19: mol_type = other DNA
tttgaatatatgtcgtatt

SEQ ID NO: 31295 - DNA, 35 bp, synthetic construct
  misc_feature 1..35: note = Synthetic oligonucleotide
  source 1..35: mol_type = other DNA
tttgataaccttttgttttaacagtactctcaaac

SEQ ID NO: 31296 - DNA, 34 bp, synthetic construct
  misc_feature 1..34: note = Synthetic oligonucleotide
  source 1..34: mol_type = other DNA
tttgccttgattccaattcgggggcagagaaact

SEQ ID NO: 31297 - DNA, 26 bp, synthetic construct
  misc_feature 1..26: note = Synthetic oligonucleotide
  source 1..26: mol_type = other DNA
tttgtatctttgtagtctgaaacaac

SEQ ID NO: 31298 - DNA, 35 bp, synthetic construct
  misc_feature 1..35: note = Synthetic oligonucleotide
  source 1..35: mol_type = other DNA
ttttacagtcacgtaaattattcagttactaaaat

SEQ ID NO: 31299 - DNA, 35 bp, synthetic construct; identical to SEQ ID NO: 31298
  misc_feature 1..35: note = Synthetic oligonucleotide
  source 1..35: mol_type = other DNA

SEQ ID NO: 31300 - DNA, 35 bp, synthetic construct
  misc_feature 1..35: note = Synthetic oligonucleotide
  source 1..35: mol_type = other DNA
ttttactaccttatagatttacactattctcaaac

SEQ ID NO: 31301 - DNA, 35 bp, synthetic construct; identical to SEQ ID NO: 31300
  misc_feature 1..35: note = Synthetic oligonucleotide
  source 1..35: mol_type = other DNA

SEQ ID NO: 31302 - DNA, 28 bp, synthetic construct
  misc_feature 1..28: note = Synthetic oligonucleotide
  source 1..28: mol_type = other DNA
ttttattaatctgaaagcaaatcacaac

SEQ ID NO: 31303 - DNA, 19 bp, synthetic construct
  misc_feature 1..19: note = Synthetic oligonucleotide
  source 1..19: mol_type = other DNA
ttttcttcagctttctttg

SEQ ID NO: 31304 - DNA, 35 bp, synthetic construct
  misc_feature 1..35: note = Synthetic oligonucleotide
  source 1..35: mol_type = other DNA
ttttgagataattttaatttaaaagggtagtaaaa

SEQ ID NO: 31305 - DNA, 36 bp, synthetic construct
  misc_feature 1..36: note = Synthetic oligonucleotide
  source 1..36: mol_type = other DNA
ttttgatctcgcccccccccggggcattgtggtatt

SEQ ID NO: 31306 - DNA, 20 bp, synthetic construct
  misc_feature 1..20: note = Synthetic oligonucleotide
  source 1..20: mol_type = other DNA
ttttggaatcaaggcaaaac

SEQ ID NO: 31307 - DNA, 35 bp, synthetic construct
  misc_feature 1..35: note = Synthetic oligonucleotide
  source 1..35: mol_type = other DNA
ttttggagtactcaaattttacatacctctaaaac

SEQ ID NO: 31308 - DNA, 35 bp, synthetic construct
  misc_feature 1..35: note = Synthetic oligonucleotide
  source 1..35: mol_type = other DNA
ttttggcttcccccccggcacgggaatgctagaat

SEQ ID NO: 31309 - DNA, 27 bp, synthetic construct
  misc_feature 1..27: note = Synthetic oligonucleotide
  source 1..27: mol_type = other DNA
ttttgtagttttgcgattgataacaac

SEQ ID NO: 31310 - DNA, 27 bp, synthetic construct
  misc_feature 1..27: note = Synthetic oligonucleotide
  source 1..27: mol_type = other DNA
ttttgtagttttgtgattgataacaac

SEQ ID NO: 31311 - DNA, 35 bp, synthetic construct
  misc_feature 1..35: note = Synthetic oligonucleotide
  source 1..35: mol_type = other DNA
ttttgtatctacattaaattacacacttctcaaac

SEQ ID NO: 31312 - DNA, 35 bp, synthetic construct; identical to SEQ ID NO: 31311
  misc_feature 1..35: note = Synthetic oligonucleotide
  source 1..35: mol_type = other DNA

SEQ ID NO: 31313 - DNA, 35 bp, synthetic construct
  misc_feature 1..35: note = Synthetic oligonucleotide
  source 1..35: mol_type = other DNA
ttttgttaccattcaaaataacatactcctaaaat

SEQ ID NO: 31314 - DNA, 35 bp, synthetic construct; identical to SEQ ID NO: 31313
  misc_feature 1..35: note = Synthetic oligonucleotide
  source 1..35: mol_type = other DNA

SEQ ID NO: 31315 - DNA, 20 bp, synthetic construct
  misc_feature 1..20: note = Synthetic oligonucleotide
  source 1..20: mol_type = other DNA
tttttacatcattctcaaac

SEQ ID NO: 31316 - DNA, 36 bp, synthetic construct
  misc_feature 1..36: note = Synthetic oligonucleotide
  source 1..36: mol_type = other DNA
tttttgttaccattcaaaataacatactcctaaaac

SEQ ID NO: 31317 - DNA, 25 bp, synthetic construct
  misc_feature 1..25: note = Synthetic oligonucleotide
  source 1..25: mol_type = other DNA
ttttttacactttttgctcttgcaa

SEQ ID NO: 31318 - DNA, 29 bp, synthetic construct
  misc_feature 1..29: note = Synthetic oligonucleotide
  source 1..29: mol_type = other DNA
ttttttctaatctttaatcaaaccacaac

SEQ ID NO: 31319 - DNA, 21 bp, synthetic construct
  misc_feature 1..21: note = Synthetic oligonucleotide
  source 1..21: mol_type = other DNA
ttttttgatgcaagctataac
